United States Patent Application Publication US 2019/0136230 A1 - sequence listing, part 3

SEQ ID NO: 49560 - RNA, 22 nt, Artificial Sequence
  Synthetic oligonucleotide: TRAC-282
gacaucacaggaacuuucuaaa

SEQ ID NO: 49561 - RNA, 23 nt, Artificial Sequence
  Synthetic oligonucleotide: TRAC-283
ugacaucacaggaacuuucuaaa

SEQ ID NO: 49562 - RNA, 24 nt, Artificial Sequence
  Synthetic oligonucleotide: TRAC-284
uugacaucacaggaacuuucuaaa

SEQ ID NO: 49563 - RNA, 18 nt, Artificial Sequence
  Synthetic oligonucleotide: TRAC-285
aucacaggaacuuucuaa

SEQ ID NO: 49564 - RNA, 19 nt, Artificial Sequence
  Synthetic oligonucleotide: TRAC-286
caucacaggaacuuucuaa

SEQ ID NO: 49565 - RNA, 20 nt, Artificial Sequence
  Synthetic oligonucleotide: TRAC-287
acaucacaggaacuuucuaa

SEQ ID NO: 49566 - RNA, 21 nt, Artificial Sequence
  Synthetic oligonucleotide: TRAC-288
gacaucacaggaacuuucuaa

SEQ ID NO: 49567 - RNA, 22 nt, Artificial Sequence
  Synthetic oligonucleotide: TRAC-289
ugacaucacaggaacuuucuaa

SEQ ID NO: 49568 - RNA, 23 nt, Artificial Sequence
  Synthetic oligonucleotide: TRAC-290
uugacaucacaggaacuuucuaa

SEQ ID NO: 49569 - RNA, 24 nt, Artificial Sequence
  Synthetic oligonucleotide: TRAC-291
cuugacaucacaggaacuuucuaa

SEQ ID NO: 49570 - RNA, 18 nt, Artificial Sequence
  Synthetic oligonucleotide: TRAC-292
ucgaccagcuugacauca

SEQ ID NO: 49571 - RNA, 19 nt, Artificial Sequence
  Synthetic oligonucleotide: TRAC-293
cucgaccagcuugacauca

SEQ ID NO: 49572 - RNA, 20 nt, Artificial Sequence
  Synthetic oligonucleotide: TRAC-294
ucucgaccagcuugacauca

SEQ ID NO: 49573 - RNA, 21 nt, Artificial Sequence
  Synthetic oligonucleotide: TRAC-295
uucucgaccagcuugacauca

SEQ ID NO: 49574 - RNA, 22 nt, Artificial Sequence
  Synthetic oligonucleotide: TRAC-296
uuucucgaccagcuugacauca

SEQ ID NO: 49575 - RNA, 23 nt, Artificial Sequence
  Synthetic oligonucleotide: TRAC-297
uuuucucgaccagcuugacauca

SEQ ID NO: 49576 - RNA, 24 nt, Artificial Sequence
  Synthetic oligonucleotide: TRAC-298
cuuuucucgaccagcuugacauca

SEQ ID NO: 49577 - RNA, 18 nt, Artificial Sequence
  Synthetic oligonucleotide: TRAC-299
cgaccagcuugacaucac

SEQ ID NO: 49578 - RNA, 19 nt, Artificial Sequence
  Synthetic oligonucleotide: TRAC-300
ucgaccagcuugacaucac

SEQ ID NO: 49579 - RNA, 20 nt, Artificial Sequence
  Synthetic oligonucleotide: TRAC-6
cucgaccagcuugacaucac

SEQ ID NO: 49580 - RNA, 21 nt, Artificial Sequence
  Synthetic oligonucleotide: TRAC-301
ucucgaccagcuugacaucac

SEQ ID NO: 49581 - RNA, 22 nt, Artificial Sequence
  Synthetic oligonucleotide: TRAC-302
uucucgaccagcuugacaucac

SEQ ID NO: 49582 - RNA, 23 nt, Artificial Sequence
  Synthetic oligonucleotide: TRAC-303
uuucucgaccagcuugacaucac

SEQ ID NO: 49583 - RNA, 24 nt, Artificial Sequence
  Synthetic oligonucleotide: TRAC-304
uuuucucgaccagcuugacaucac

SEQ ID NO: 49584 - RNA, 18 nt, Artificial Sequence
  Synthetic oligonucleotide: TRAC-305
ucuggauaucugugggac

SEQ ID NO: 49585 - RNA, 19 nt, Artificial Sequence
  Synthetic oligonucleotide: TRAC-306
uucuggauaucugugggac

SEQ ID NO: 49586 - RNA, 20 nt, Artificial Sequence
  Synthetic oligonucleotide: TRAC-307
guucuggauaucugugggac

SEQ ID NO: 49587 - RNA, 21 nt, Artificial Sequence
  Synthetic oligonucleotide: TRAC-308
gguucuggauaucugugggac

SEQ ID NO: 49588 - RNA, 22 nt, Artificial Sequence
  Synthetic oligonucleotide: TRAC-309
ggguucuggauaucugugggac

SEQ ID NO: 49589 - RNA, 23 nt, Artificial Sequence
  Synthetic oligonucleotide: TRAC-310
aggguucuggauaucugugggac

SEQ ID NO: 49590 - RNA, 24 nt, Artificial Sequence
  Synthetic oligonucleotide: TRAC-311
caggguucuggauaucugugggac

SEQ ID NO: 49591 - RNA, 18 nt, Artificial Sequence
  Synthetic oligonucleotide: TRAC-312
caccaaagcugcccuuac

SEQ ID NO: 49592 - RNA, 19 nt, Artificial Sequence
  Synthetic oligonucleotide: TRAC-313
gcaccaaagcugcccuuac

SEQ ID NO: 49593 - RNA, 20 nt, Artificial Sequence
  Synthetic oligonucleotide: TRAC-314
ggcaccaaagcugcccuuac

SEQ ID NO: 49594 - RNA, 21 nt, Artificial Sequence
  Synthetic oligonucleotide: TRAC-315
aggcaccaaagcugcccuuac

SEQ ID NO: 49595 - RNA, 22 nt, Artificial Sequence
  Synthetic oligonucleotide: TRAC-316
aaggcaccaaagcugcccuuac

SEQ ID NO: 49596 - RNA, 23 nt, Artificial Sequence
  Synthetic oligonucleotide: TRAC-317
gaaggcaccaaagcugcccuuac

SEQ ID NO: 49597 - RNA, 24 nt, Artificial Sequence
  Synthetic oligonucleotide: TRAC-318
cgaaggcaccaaagcugcccuuac

SEQ ID NO: 49598 - RNA, 18 nt, Artificial Sequence
  Synthetic oligonucleotide: TRAC-319
guucguaucuguaaaacc

SEQ ID NO: 49599 - RNA, 19 nt, Artificial Sequence
  Synthetic oligonucleotide: TRAC-320
gguucguaucuguaaaacc

SEQ ID NO: 49600 - RNA, 20 nt, Artificial Sequence
  Synthetic oligonucleotide: TRAC-321
agguucguaucuguaaaacc

SEQ ID NO: 49601 - RNA, 21 nt, Artificial Sequence
  Synthetic oligonucleotide: TRAC-322
uagguucguaucuguaaaacc

SEQ ID NO: 49602 - RNA, 22 nt, Artificial Sequence
  Synthetic oligonucleotide: TRAC-323
uuagguucguaucuguaaaacc

SEQ ID NO: 49603 - RNA, 23 nt, Artificial Sequence
  Synthetic oligonucleotide: TRAC-324
uuuagguucguaucuguaaaacc

SEQ ID NO: 49604 - RNA, 24 nt, Artificial Sequence
  Synthetic oligonucleotide: TRAC-325
guuuagguucguaucuguaaaacc

SEQ ID NO: 49605 - RNA, 18 nt, Artificial Sequence
  Synthetic oligonucleotide: TRAC-326
agcugcccuuaccugggc

SEQ ID NO: 49606 - RNA, 19 nt, Artificial Sequence
  Synthetic oligonucleotide: TRAC-327
aagcugcccuuaccugggc

SEQ ID NO: 49607 - RNA, 20 nt, Artificial Sequence
  Synthetic oligonucleotide: TRAC-112
aaagcugcccuuaccugggc

SEQ ID NO: 49608 - RNA, 21 nt, Artificial Sequence
  Synthetic oligonucleotide: TRAC-328
caaagcugcccuuaccugggc

SEQ ID NO: 49609 - RNA, 22 nt, Artificial Sequence
  Synthetic oligonucleotide: TRAC-329
ccaaagcugcccuuaccugggc

SEQ ID NO: 49610 - RNA, 23 nt, Artificial Sequence
  Synthetic oligonucleotide: TRAC-330
accaaagcugcccuuaccugggc

SEQ ID NO: 49611 - RNA, 24 nt, Artificial Sequence
  Synthetic oligonucleotide: TRAC-331
caccaaagcugcccuuaccugggc

SEQ ID NO: 49612 - RNA, 18 nt, Artificial Sequence
  Synthetic oligonucleotide: TRAC-332
gccacagcacuguugcuc

SEQ ID NO: 49613 - RNA, 19 nt, Artificial Sequence
  Synthetic oligonucleotide: TRAC-333
ggccacagcacuguugcuc

SEQ ID NO: 49614 - RNA, 20 nt, Artificial Sequence
  Synthetic oligonucleotide: TRAC-334
aggccacagcacuguugcuc

SEQ ID NO: 49615 - RNA, 21 nt, Artificial Sequence
  Synthetic oligonucleotide: TRAC-335
caggccacagcacuguugcuc

SEQ ID NO: 49616 - RNA, 22 nt, Artificial Sequence
  Synthetic oligonucleotide: TRAC-336
ccaggccacagcacuguugcuc

SEQ ID NO: 49617 - RNA, 23 nt, Artificial Sequence
  Synthetic oligonucleotide: TRAC-337
uccaggccacagcacuguugcuc

SEQ ID NO: 49618 - RNA, 24 nt, Artificial Sequence
  Synthetic oligonucleotide: TRAC-338
cuccaggccacagcacuguugcuc

SEQ ID NO: 49619 - RNA, 18 nt, Artificial Sequence
  Synthetic oligonucleotide: TRAC-339
gaccacagccgcagcguc

SEQ ID NO: 49620 - RNA, 19 nt, Artificial Sequence
  Synthetic oligonucleotide: TRAC-340
ggaccacagccgcagcguc

SEQ ID NO: 49621 - RNA, 20 nt, Artificial Sequence
  Synthetic oligonucleotide: TRAC-341
uggaccacagccgcagcguc

SEQ ID NO: 49622 - RNA, 21 nt, Artificial Sequence
  Synthetic oligonucleotide: TRAC-342
cuggaccacagccgcagcguc

SEQ ID NO: 49623 - RNA, 22 nt, Artificial Sequence
  Synthetic oligonucleotide: TRAC-343
gcuggaccacagccgcagcguc

SEQ ID NO: 49624 - RNA, 23 nt, Artificial Sequence
  Synthetic oligonucleotide: TRAC-344
agcuggaccacagccgcagcguc

SEQ ID NO: 49625 - RNA, 24 nt, Artificial Sequence
  Synthetic oligonucleotide: TRAC-345
cagcuggaccacagccgcagcguc

SEQ ID NO: 49626 - RNA, 18 nt, Artificial Sequence
  Synthetic oligonucleotide: TRAC-346
uuaaacccggccacuuuc

SEQ ID NO: 49627 - RNA, 19 nt, Artificial Sequence
  Synthetic oligonucleotide: TRAC-347
auuaaacccggccacuuuc

SEQ ID NO: 49628 - RNA, 20 nt, Artificial Sequence
  Synthetic oligonucleotide: TRAC-12
gauuaaacccggccacuuuc

SEQ ID NO: 49629 - RNA, 21 nt, Artificial Sequence
  Synthetic oligonucleotide: TRAC-348
agauuaaacccggccacuuuc

SEQ ID NO: 49630 - RNA, 22 nt, Artificial Sequence
  Synthetic oligonucleotide: TRAC-349
cagauuaaacccggccacuuuc

SEQ ID NO: 49631 - RNA, 23 nt, Artificial Sequence
  Synthetic oligonucleotide: TRAC-350
gcagauuaaacccggccacuuuc

SEQ ID NO: 49632 - RNA, 24 nt, Artificial Sequence
  Synthetic oligonucleotide: TRAC-351
agcagauuaaacccggccacuuuc

SEQ ID NO: 49633 - RNA, 18 nt, Artificial Sequence
  Synthetic oligonucleotide: TRAC-352
caaggccccucaccucag

SEQ ID NO: 49634 - RNA, 19 nt, Artificial Sequence
  Synthetic oligonucleotide: TRAC-353
ucaaggccccucaccucag

SEQ ID NO: 49635 - RNA, 20 nt, Artificial Sequence
  Synthetic oligonucleotide: TRAC-354
uucaaggccccucaccucag

SEQ ID NO: 49636 - RNA, 21 nt, Artificial Sequence
  Synthetic oligonucleotide: TRAC-355
cuucaaggccccucaccucag

SEQ ID NO: 49637 - RNA, 22 nt, Artificial Sequence
  Synthetic oligonucleotide: TRAC-356
gcuucaaggccccucaccucag

SEQ ID NO: 49638 - RNA, 23 nt, Artificial Sequence
  Synthetic oligonucleotide: TRAC-357
agcuucaaggccccucaccucag

SEQ ID NO: 49639 - RNA, 24 nt, Artificial Sequence
  Synthetic oligonucleotide: TRAC-358
cagcuucaaggccccucaccucag

SEQ ID NO: 49640 - RNA, 18 nt, Artificial Sequence
  Synthetic oligonucleotide: TRAC-359
aaacccggccacuuucag

SEQ ID NO: 49641 - RNA, 19 nt, Artificial Sequence
  Synthetic oligonucleotide: TRAC-360
uaaacccggccacuuucag

SEQ ID NO: 49642 - RNA, 20 nt, Artificial Sequence
  Synthetic oligonucleotide: TRAC-361
uuaaacccggccacuuucag

SEQ ID NO: 49643 - RNA, 21 nt, Artificial Sequence
  Synthetic oligonucleotide: TRAC-362
auuaaacccggccacuuucag

SEQ ID NO: 49644 - RNA, 22 nt, Artificial Sequence
  Synthetic oligonucleotide: TRAC-363
gauuaaacccggccacuuucag

SEQ ID NO: 49645 - RNA, 23 nt, Artificial Sequence
  Synthetic oligonucleotide: TRAC-364
agauuaaacccggccacuuucag

SEQ ID NO: 49646 - RNA, 24 nt, Artificial Sequence
  Synthetic oligonucleotide: TRAC-365
cagauuaaacccggccacuuucag

SEQ ID NO: 49647 - RNA, 18 nt, Artificial Sequence
  Synthetic oligonucleotide: TRAC-366
aacccggccacuuucagg

SEQ ID NO: 49648 - RNA, 19 nt, Artificial Sequence
  Synthetic oligonucleotide: TRAC-367
aaacccggccacuuucagg

SEQ ID NO: 49649 - RNA, 20 nt, Artificial Sequence
  Synthetic oligonucleotide: TRAC-14
uaaacccggccacuuucagg

SEQ ID NO: 49650 - RNA, 21 nt, Artificial Sequence
  Synthetic oligonucleotide: TRAC-368
uuaaacccggccacuuucagg

SEQ ID NO: 49651 - RNA, 22 nt, Artificial Sequence
  Synthetic oligonucleotide: TRAC-369
auuaaacccggccacuuucagg

SEQ ID NO: 49652 - RNA, 23 nt, Artificial Sequence
  Synthetic oligonucleotide: TRAC-370
gauuaaacccggccacuuucagg

SEQ ID NO: 49653 - RNA, 24 nt, Artificial Sequence
  Synthetic oligonucleotide: TRAC-371
agauuaaacccggccacuuucagg

SEQ ID NO: 49654 - RNA, 18 nt, Artificial Sequence
  Synthetic oligonucleotide: TRAC-372
cccuuaccugggcugggg

SEQ ID NO: 49655 - RNA, 19 nt, Artificial Sequence
  Synthetic oligonucleotide: TRAC-373
gcccuuaccugggcugggg

SEQ ID NO: 49656 - RNA, 20 nt, Artificial Sequence
  Synthetic oligonucleotide: TRAC-374
ugcccuuaccugggcugggg

SEQ ID NO: 49657 - RNA, 21 nt, Artificial Sequence
  Synthetic oligonucleotide: TRAC-375
cugcccuuaccugggcugggg

SEQ ID NO: 49658 - RNA, 22 nt, Artificial Sequence
  Synthetic oligonucleotide: TRAC-376
gcugcccuuaccugggcugggg

SEQ ID NO: 49659 - RNA, 23 nt, Artificial Sequence
  Synthetic oligonucleotide: TRAC-377
agcugcccuuaccugggcugggg

SEQ ID NO: 49660 - RNA, 24 nt, Artificial Sequence
  Synthetic oligonucleotide: TRAC-378
aagcugcccuuaccugggcugggg

SEQ ID NO: 49661 - RNA, 18 nt, Artificial Sequence
  Synthetic oligonucleotide: TRAC-379
aagcugcccuuaccuggg

SEQ ID NO: 49662 - RNA, 19 nt, Artificial Sequence
  Synthetic oligonucleotide: TRAC-380
aaagcugcccuuaccuggg

SEQ ID NO: 49663 - RNA, 20 nt, Artificial Sequence
  Synthetic oligonucleotide: TRAC-381
caaagcugcccuuaccuggg

SEQ ID NO: 49664 - RNA, 21 nt, Artificial Sequence
  Synthetic oligonucleotide: TRAC-382
ccaaagcugcccuuaccuggg

SEQ ID NO: 49665 - RNA, 22 nt, Artificial Sequence
  Synthetic oligonucleotide: TRAC-383
accaaagcugcccuuaccuggg

SEQ ID NO: 49666 - RNA, 23 nt, Artificial Sequence
  Synthetic oligonucleotide: TRAC-384
caccaaagcugcccuuaccuggg

SEQ ID NO: 49667 - RNA, 24 nt, Artificial Sequence
  Synthetic oligonucleotide: TRAC-385
gcaccaaagcugcccuuaccuggg

SEQ ID NO: 49668 - RNA, 18 nt, Artificial Sequence
  Synthetic oligonucleotide: TRAC-386
cugcccuuaccugggcug

SEQ ID NO: 49669 - RNA, 19 nt, Artificial Sequence
  Synthetic oligonucleotide: TRAC-387
gcugcccuuaccugggcug

SEQ ID NO: 49670 - RNA, 20 nt, Artificial Sequence
  Synthetic oligonucleotide: TRAC-127
agcugcccuuaccugggcug

SEQ ID NO: 49671 - RNA, 21 nt, Artificial Sequence
  Synthetic oligonucleotide: TRAC-388
aagcugcccuuaccugggcug

SEQ ID NO: 49672 - RNA, 22 nt, Artificial Sequence
  Synthetic oligonucleotide: TRAC-389
aaagcugcccuuaccugggcug

SEQ ID NO: 49673 - RNA, 23 nt, Artificial Sequence
  Synthetic oligonucleotide: TRAC-390
caaagcugcccuuaccugggcug

SEQ ID NO: 49674 - RNA, 24 nt, Artificial Sequence
  Synthetic oligonucleotide: TRAC-391
ccaaagcugcccuuaccugggcug

SEQ ID NO: 49675 - RNA, 18 nt, Artificial Sequence
  Synthetic oligonucleotide: TRAC-392
caggguucuggauaucug

SEQ ID NO: 49676 - RNA, 19 nt, Artificial Sequence
  Synthetic oligonucleotide: TRAC-393
ucaggguucuggauaucug

SEQ ID NO: 49677 - RNA, 20 nt, Artificial Sequence
  Synthetic oligonucleotide: TRAC-129
gucaggguucuggauaucug

SEQ ID NO: 49678 - RNA, 21 nt, Artificial Sequence
  Synthetic oligonucleotide: TRAC-394
ggucaggguucuggauaucug

SEQ ID NO: 49679 - RNA, 22 nt, Artificial Sequence
  Synthetic oligonucleotide: TRAC-395
gggucaggguucuggauaucug

SEQ ID NO: 49680 - RNA, 23 nt, Artificial Sequence
  Synthetic oligonucleotide: TRAC-396
agggucaggguucuggauaucug

SEQ ID NO: 49681 - RNA, 24 nt, Artificial Sequence
  Synthetic oligonucleotide: TRAC-397
cagggucaggguucuggauaucug

SEQ ID NO: 49682 - RNA, 18 nt, Artificial Sequence
  Synthetic oligonucleotide: TRAC-398
ucuggaauaaugcuguug

SEQ ID NO: 49683 - RNA, 19 nt, Artificial Sequence
  Synthetic oligonucleotide: TRAC-399
uucuggaauaaugcuguug

SEQ ID NO: 49684 - RNA, 20 nt, Artificial Sequence
  Synthetic oligonucleotide: TRAC-400
cuucuggaauaaugcuguug

SEQ ID NO: 49685 - RNA, 21 nt, Artificial Sequence
  Synthetic oligonucleotide: TRAC-401
ucuucuggaauaaugcuguug

SEQ ID NO: 49686 - RNA, 22 nt, Artificial Sequence
  Synthetic oligonucleotide: TRAC-402
gucuucuggaauaaugcuguug

SEQ ID NO: 49687 - RNA, 23 nt, Artificial Sequence
  Synthetic oligonucleotide: TRAC-403
ugucuucuggaauaaugcuguug

SEQ ID NO: 49688 - RNA, 24 nt, Artificial Sequence
  Synthetic oligonucleotide: TRAC-404
gugucuucuggaauaaugcuguug

SEQ ID NO: 49689 - RNA, 18 nt, Artificial Sequence
  Synthetic oligonucleotide: TRAC-405
cacuuucaggaggaggau

SEQ ID NO: 49690 - RNA, 19 nt, Artificial Sequence
  Synthetic oligonucleotide: TRAC-406
ccacuuucaggaggaggau

SEQ ID NO: 49691 - RNA, 20 nt, Artificial Sequence
  Synthetic oligonucleotide: TRAC-407
gccacuuucaggaggaggau

SEQ ID NO: 49692 - RNA, 21 nt, Artificial Sequence
  Synthetic oligonucleotide: TRAC-408
ggccacuuucaggaggaggau

SEQ ID NO: 49693 - RNA, 22 nt, Artificial Sequence
  Synthetic oligonucleotide: TRAC-409
cggccacuuucaggaggaggau

SEQ ID NO: 49694 - RNA, 23 nt, Artificial Sequence
  Synthetic oligonucleotide: TRAC-410
ccggccacuuucaggaggaggau

SEQ ID NO: 49695 - RNA, 24 nt, Artificial Sequence
  Synthetic oligonucleotide: TRAC-411
cccggccacuuucaggaggaggau

SEQ ID NO: 49696 - RNA, 18 nt, Artificial Sequence
  Synthetic oligonucleotide: TRAC-412
gcugcccuuaccugggcu

SEQ ID NO: 49697 - RNA, 19 nt, Artificial Sequence
  Synthetic oligonucleotide: TRAC-413
agcugcccuuaccugggcu

SEQ ID NO: 49698 - RNA, 20 nt, Artificial Sequence
  Synthetic oligonucleotide: TRAC-136
aagcugcccuuaccugggcu

SEQ ID NO: 49699 - RNA, 21 nt, Artificial Sequence
  Synthetic oligonucleotide: TRAC-414
aaagcugcccuuaccugggcu

SEQ ID NO: 49700 - RNA, 22 nt, Artificial Sequence
  Synthetic oligonucleotide: TRAC-415
caaagcugcccuuaccugggcu

SEQ ID NO: 49701 - RNA, 23 nt, Artificial Sequence
  Synthetic oligonucleotide: TRAC-416
ccaaagcugcccuuaccugggcu

SEQ ID NO: 49702 - RNA, 24 nt, Artificial Sequence
  Synthetic oligonucleotide: TRAC-417
accaaagcugcccuuaccugggcu

SEQ ID NO: 49703 - RNA, 18 nt, Artificial Sequence
  Synthetic oligonucleotide: TRAC-418
ucaggguucuggauaucu

SEQ ID NO: 49704 - RNA, 19 nt, Artificial Sequence
  Synthetic oligonucleotide: TRAC-419
gucaggguucuggauaucu

SEQ ID NO: 49705 - RNA, 20 nt, Artificial Sequence
  Synthetic oligonucleotide: TRAC-420
ggucaggguucuggauaucu

SEQ ID NO: 49706 - RNA, 21 nt, Artificial Sequence
  Synthetic oligonucleotide: TRAC-421
gggucaggguucuggauaucu

SEQ ID NO: 49707 - RNA, 22 nt, Artificial Sequence
  Synthetic oligonucleotide: TRAC-422
agggucaggguucuggauaucu

SEQ ID NO: 49708 - RNA, 23 nt, Artificial Sequence
  Synthetic oligonucleotide: TRAC-423
cagggucaggguucuggauaucu

SEQ ID NO: 49709 - RNA, 24 nt, Artificial Sequence
  Synthetic oligonucleotide: TRAC-424
gcagggucaggguucuggauaucu

SEQ ID NO: 49710 - RNA, 18 nt, Artificial Sequence
  Synthetic oligonucleotide: TRAC-425
ggacaagaggaucagggu

SEQ ID NO: 49711 - RNA, 19 nt, Artificial Sequence
  Synthetic oligonucleotide: TRAC-426
gggacaagaggaucagggu

SEQ ID NO: 49712 - RNA, 20 nt, Artificial Sequence
  Synthetic oligonucleotide: TRAC-427
ugggacaagaggaucagggu

SEQ ID NO: 49713 - RNA, 21 nt, Artificial Sequence
  Synthetic oligonucleotide: TRAC-428
gugggacaagaggaucagggu

SEQ ID NO: 49714 - RNA, 22 nt, Artificial Sequence
  Synthetic oligonucleotide: TRAC-429
ugugggacaagaggaucagggu

SEQ ID NO: 49715 - RNA, 23 nt, Artificial Sequence
  Synthetic oligonucleotide: TRAC-430
cugugggacaagaggaucagggu

SEQ ID NO: 49716 - RNA, 24 nt, Artificial Sequence
  Synthetic oligonucleotide: TRAC-431
ucugugggacaagaggaucagggu

SEQ ID NO: 49717 - RNA, 18 nt, Artificial Sequence
  Synthetic oligonucleotide: TRAC-432
acuuugugacacauuugu

SEQ ID NO: 49718 - RNA, 19 nt, Artificial Sequence
  Synthetic oligonucleotide: TRAC-433
uacuuugugacacauuugu

SEQ ID NO: 49719 - RNA, 20 nt, Artificial Sequence
  Synthetic oligonucleotide: TRAC-434
uuacuuugugacacauuugu

SEQ ID NO: 49720 - RNA, 21 nt, Artificial Sequence
  Synthetic oligonucleotide: TRAC-435
cuuacuuugugacacauuugu

SEQ ID NO: 49721 - RNA, 22 nt, Artificial Sequence
  Synthetic oligonucleotide: TRAC-436
ccuuacuuugugacacauuugu

SEQ ID NO: 49722 - RNA, 23 nt, Artificial Sequence
  Synthetic oligonucleotide: TRAC-437
uccuuacuuugugacacauuugu

SEQ ID NO: 49723 - RNA, 24 nt, Artificial Sequence
  Synthetic oligonucleotide: TRAC-438
auccuuacuuugugacacauuugu

SEQ ID NO: 49724 - RNA, 18 nt, Artificial Sequence
  Synthetic oligonucleotide: TRAC-439
acuuucaggaggaggauu

SEQ ID NO: 49725 - RNA, 19 nt, Artificial Sequence
  Synthetic oligonucleotide: TRAC-440
cacuuucaggaggaggauu

SEQ ID NO: 49726 - RNA, 20 nt, Artificial Sequence
  Synthetic oligonucleotide: TRAC-138
ccacuuucaggaggaggauu

SEQ ID NO: 49727 - RNA, 21 nt, Artificial Sequence
  Synthetic oligonucleotide: TRAC-441
gccacuuucaggaggaggauu

SEQ ID NO: 49728 - RNA, 22 nt, Artificial Sequence
  Synthetic oligonucleotide: TRAC-442
ggccacuuucaggaggaggauu

SEQ ID NO: 49729 - RNA, 23 nt, Artificial Sequence
  Synthetic oligonucleotide: TRAC-443
cggccacuuucaggaggaggauu

SEQ ID NO: 49730 - RNA, 24 nt, Artificial Sequence
  Synthetic oligonucleotide: TRAC-444
ccggccacuuucaggaggaggauu

SEQ ID NO: 49731 - RNA, 18 nt, Artificial Sequence
  Synthetic oligonucleotide: TRAC-445
uggggaagaaggugucuu

SEQ ID NO: 49732 - RNA, 19 nt, Artificial Sequence
  Synthetic oligonucleotide: TRAC-446
cuggggaagaaggugucuu

SEQ ID NO: 49733 - RNA, 20 nt, Artificial Sequence
  Synthetic oligonucleotide: TRAC-447
gcuggggaagaaggugucuu

SEQ ID NO: 49734 - RNA, 21 nt, Artificial Sequence
  Synthetic oligonucleotide: TRAC-448
ggcuggggaagaaggugucuu

SEQ ID NO: 49735 - RNA, 22 nt, Artificial Sequence
  Synthetic oligonucleotide: TRAC-449
gggcuggggaagaaggugucuu

SEQ ID NO: 49736 - RNA, 23 nt, Artificial Sequence
  Synthetic oligonucleotide: TRAC-450
ugggcuggggaagaaggugucuu

SEQ ID NO: 49737 - RNA, 24 nt, Artificial Sequence
  Synthetic oligonucleotide: TRAC-451
cugggcuggggaagaaggugucuu

SEQ ID NO: 49738 - RNA, 18 nt, Artificial Sequence
  Synthetic oligonucleotide: TRAC-452
cccaaucacugacagguu

SEQ ID NO: 49739 - RNA, 19 nt, Artificial Sequence
  Synthetic oligonucleotide: TRAC-453
acccaaucacugacagguu

SEQ ID NO: 49740 - RNA, 20 nt, Artificial Sequence
  Synthetic oligonucleotide: TRAC-454
aacccaaucacugacagguu

SEQ ID NO: 49741 - RNA, 21 nt, Artificial Sequence
  Synthetic oligonucleotide: TRAC-455
gaacccaaucacugacagguu

SEQ ID NO: 49742 - RNA, 22 nt, Artificial Sequence
  Synthetic oligonucleotide: TRAC-456
ggaacccaaucacugacagguu

SEQ ID NO: 49743 - RNA, 23 nt, Artificial Sequence
  Synthetic oligonucleotide: TRAC-457
cggaacccaaucacugacagguu

SEQ ID NO: 49744 - RNA, 24 nt, Artificial Sequence
  Synthetic oligonucleotide: TRAC-458
ucggaacccaaucacugacagguu

SEQ ID NO: 49745 - RNA, 18 nt, Artificial Sequence
  Synthetic oligonucleotide: TRAC-459
auuaaacccggccacuuu

SEQ ID NO: 49746 - RNA, 19 nt, Artificial Sequence
  Synthetic oligonucleotide: TRAC-460
gauuaaacccggccacuuu

SEQ ID NO: 49747 - RNA, 20 nt, Artificial Sequence
  Synthetic oligonucleotide: TRAC-461
agauuaaacccggccacuuu

SEQ ID NO: 49748 - RNA, 21 nt, Artificial Sequence
  Synthetic oligonucleotide: TRAC-462
cagauuaaacccggccacuuu

SEQ ID NO: 49749 - RNA, 22 nt, Artificial Sequence
  Synthetic oligonucleotide: TRAC-463
gcagauuaaacccggccacuuu

SEQ ID NO: 49750 - RNA, 23 nt, Artificial Sequence
  Synthetic oligonucleotide: TRAC-464
agcagauuaaacccggccacuuu

SEQ ID NO: 49751 - RNA, 24 nt, Artificial Sequence
  Synthetic oligonucleotide: TRAC-465
gagcagauuaaacccggccacuuu

SEQ ID NO: 49752 - RNA, 18 nt, Artificial Sequence
  Synthetic oligonucleotide: TRAC-466
gcuuugaaacagguaaga

SEQ ID NO: 49753 - RNA, 19 nt, Artificial Sequence
  Synthetic oligonucleotide: TRAC-467
agcuuugaaacagguaaga

SEQ ID NO: 49754 - RNA, 20 nt, Artificial Sequence
  Synthetic oligonucleotide: TRAC-468
aagcuuugaaacagguaaga

SEQ ID NO: 49755 - RNA, 21 nt, Artificial Sequence
  Synthetic oligonucleotide: TRAC-469
aaagcuuugaaacagguaaga

SEQ ID NO: 49756 - RNA, 22 nt, Artificial Sequence
  Synthetic oligonucleotide: TRAC-470
aaaagcuuugaaacagguaaga

SEQ ID NO: 49757 - RNA, 23 nt, Artificial Sequence
  Synthetic oligonucleotide: TRAC-471
gaaaagcuuugaaacagguaaga

SEQ ID NO: 49758 - RNA, 24 nt, Artificial Sequence
  Synthetic oligonucleotide: TRAC-472
agaaaagcuuugaaacagguaaga

SEQ ID NO: 49759 - RNA, 18 nt, Artificial Sequence
  Synthetic oligonucleotide: TRAC-473
ggggccuugaagcuggga

SEQ ID NO: 49760 - RNA, 19 nt, Artificial Sequence
  Synthetic oligonucleotide: TRAC-474
aggggccuugaagcuggga

SEQ ID NO: 49761 - RNA, 20 nt, Artificial Sequence
  Synthetic oligonucleotide: TRAC-475
gaggggccuugaagcuggga

SEQ ID NO: 49762 - RNA, 21 nt, Artificial Sequence
  Synthetic oligonucleotide: TRAC-476
ugaggggccuugaagcuggga

SEQ ID NO: 49763 - RNA, 22 nt, Artificial Sequence
  Synthetic oligonucleotide: TRAC-477
gugaggggccuugaagcuggga

SEQ ID NO: 49764 - RNA, 23 nt, Artificial Sequence
  Synthetic oligonucleotide: TRAC-478
ggugaggggccuugaagcuggga

SEQ ID NO: 49765 - RNA, 24 nt, Artificial Sequence
  Synthetic oligonucleotide: TRAC-479
aggugaggggccuugaagcuggga

SEQ ID NO: 49766 - RNA, 18 nt, Artificial Sequence
  Synthetic oligonucleotide: TRAC-480
gacaaaacugugcuagac

SEQ ID NO: 49767 - RNA, 19 nt, Artificial Sequence
  Synthetic oligonucleotide: TRAC-481
agacaaaacugugcuagac

SEQ ID NO: 49768 - RNA, 20 nt, Artificial Sequence
  Synthetic oligonucleotide: TRAC-482
cagacaaaacugugcuagac

SEQ ID NO: 49769 - RNA, 21 nt, Artificial Sequence
  Synthetic oligonucleotide: TRAC-483
acagacaaaacugugcuagac

SEQ ID NO: 49770 - RNA, 22 nt, Artificial Sequence
  Synthetic oligonucleotide: TRAC-484
cacagacaaaacugugcuagac

SEQ ID NO: 49771 - RNA, 23 nt, Artificial Sequence
  Synthetic oligonucleotide: TRAC-485
ucacagacaaaacugugcuagac

SEQ ID NO: 49772 - RNA, 24 nt, Artificial Sequence
  Synthetic oligonucleotide: TRAC-486
aucacagacaaaacugugcuagac

SEQ ID NO: 49773 - RNA, 18 nt, Artificial Sequence
  Synthetic oligonucleotide: TRAC-487
cagcugaggugaggggcc

SEQ ID NO: 49774 - RNA, 19 nt, Artificial Sequence
  Synthetic oligonucleotide: TRAC-488
ccagcugaggugaggggcc

SEQ ID NO: 49775 - RNA, 20 nt, Artificial Sequence
  Synthetic oligonucleotide: TRAC-489
uccagcugaggugaggggcc

SEQ ID NO: 49776 - RNA, 21 nt, Artificial Sequence
  Synthetic oligonucleotide: TRAC-490
guccagcugaggugaggggcc

SEQ ID NO: 49777 - RNA, 22 nt, Artificial Sequence
  Synthetic oligonucleotide: TRAC-491
gguccagcugaggugaggggcc

SEQ ID NO: 49778 - RNA, 23 nt, Artificial Sequence
  Synthetic oligonucleotide: TRAC-492
ugguccagcugaggugaggggcc

SEQ ID NO: 49779 - RNA, 24 nt, Artificial Sequence
  Synthetic oligonucleotide: TRAC-493
gugguccagcugaggugaggggcc

SEQ ID NO: 49780 - RNA, 18 nt, Artificial Sequence
  Synthetic oligonucleotide: TRAC-494
agcaacagugcuguggcc

SEQ ID NO: 49781 - RNA, 19 nt, Artificial Sequence
  Synthetic oligonucleotide: TRAC-495
gagcaacagugcuguggcc

SEQ ID NO: 49782 - RNA, 20 nt, Artificial Sequence
  Synthetic oligonucleotide: TRAC-105
agagcaacagugcuguggcc

SEQ ID NO: 49783 - RNA, 21 nt, Artificial Sequence
  Synthetic oligonucleotide: TRAC-496
aagagcaacagugcuguggcc

SEQ ID NO: 49784 - RNA, 22 nt, Artificial Sequence
  Synthetic oligonucleotide: TRAC-497
caagagcaacagugcuguggcc

SEQ ID NO: 49785 - RNA, 23 nt, Artificial Sequence
  Synthetic oligonucleotide: TRAC-498
ucaagagcaacagugcuguggcc

SEQ ID NO: 49786 - RNA, 24 nt, Artificial Sequence
  Synthetic oligonucleotide: TRAC-499
uucaagagcaacagugcuguggcc

SEQ ID NO: 49787 - RNA, 18 nt, Artificial Sequence
  Synthetic oligonucleotide: TRAC-500
ggugaggggccuugaagc

SEQ ID NO: 49788 - RNA, 19 nt, Artificial Sequence
  Synthetic oligonucleotide: TRAC-501
aggugaggggccuugaagc

SEQ ID NO: 49789 - RNA, 20 nt, Artificial Sequence
  Synthetic oligonucleotide: TRAC-108
gaggugaggggccuugaagc

SEQ ID NO: 49790 - RNA, 21 nt, Artificial Sequence
  Synthetic oligonucleotide: TRAC-502
ugaggugaggggccuugaagc

SEQ ID NO: 49791 - RNA, 22 nt, Artificial Sequence
  Synthetic oligonucleotide: TRAC-503
cugaggugaggggccuugaagc

SEQ ID NO: 49792 - RNA, 23 nt, Artificial Sequence
  Synthetic oligonucleotide: TRAC-504
gcugaggugaggggccuugaagc

SEQ ID NO: 49793 - RNA, 24 nt, Artificial Sequence
  Synthetic oligonucleotide: TRAC-505
agcugaggugaggggccuugaagc

SEQ ID NO: 49794 - RNA, 18 nt, Artificial Sequence
  Synthetic oligonucleotide: TRAC-506
gagcaacagugcuguggc

SEQ ID NO: 49795 - RNA, 19 nt, Artificial Sequence
  Synthetic oligonucleotide: TRAC-507
agagcaacagugcuguggc

SEQ ID NO: 49796 - RNA, 20 nt, Artificial Sequence
  Synthetic oligonucleotide: TRAC-508
aagagcaacagugcuguggc

SEQ ID NO: 49797 - RNA, 21 nt, Artificial Sequence
  Synthetic oligonucleotide: TRAC-509
caagagcaacagugcuguggc

SEQ ID NO: 49798 - RNA, 22 nt, Artificial Sequence
  Synthetic oligonucleotide: TRAC-510
ucaagagcaacagugcuguggc

SEQ ID NO: 49799 - RNA, 23 nt, Artificial Sequence
  Synthetic oligonucleotide: TRAC-511
uucaagagcaacagugcuguggc

SEQ ID NO: 49800 - RNA, 24 nt, Artificial Sequence
  Synthetic oligonucleotide: TRAC-512
cuucaagagcaacagugcuguggc

SEQ ID NO: 49801 - RNA, 18 nt, Artificial Sequence
  Synthetic oligonucleotide: TRAC-513
ucuugucccacagauauc

SEQ ID NO: 49802 - RNA, 19 nt, Artificial Sequence
  Synthetic oligonucleotide: TRAC-514
cucuugucccacagauauc

SEQ ID NO: 49803 - RNA, 20 nt, Artificial Sequence
  Synthetic oligonucleotide: TRAC-515
ccucuugucccacagauauc

SEQ ID NO: 49804 - RNA, 21 nt, Artificial Sequence
  Synthetic oligonucleotide: TRAC-516
uccucuugucccacagauauc

SEQ ID NO: 49805 - RNA, 22 nt, Artificial Sequence
  Synthetic oligonucleotide: TRAC-517
auccucuugucccacagauauc

SEQ ID NO: 49806 - RNA, 23 nt, Artificial Sequence
  Synthetic oligonucleotide: TRAC-518
gauccucuugucccacagauauc

SEQ ID NO: 49807 - RNA, 24 nt, Artificial Sequence
  Synthetic oligonucleotide: TRAC-519
ugauccucuugucccacagauauc

SEQ ID NO: 49808 - RNA, 18 nt, Artificial Sequence
  Synthetic oligonucleotide: TRAC-520
ggguuccgaauccuccuc

SEQ ID NO: 49809 - RNA, 19 nt, Artificial Sequence
  Synthetic oligonucleotide: TRAC-521
uggguuccgaauccuccuc

SEQ ID NO: 49810 - RNA, 20 nt, Artificial Sequence
  Synthetic oligonucleotide: TRAC-522
uuggguuccgaauccuccuc

SEQ ID NO: 49811 - RNA, 21 nt, Artificial Sequence
  Synthetic oligonucleotide: TRAC-523
auuggguuccgaauccuccuc

SEQ ID NO: 49812 - RNA, 22 nt, Artificial Sequence
  Synthetic oligonucleotide: TRAC-524
gauuggguuccgaauccuccuc

SEQ ID NO: 49813 - RNA, 23 nt, Artificial Sequence
  Synthetic oligonucleotide: TRAC-525
ugauuggguuccgaauccuccuc

SEQ ID NO: 49814 - RNA, 24 nt, Artificial Sequence
  Synthetic oligonucleotide: TRAC-526
gugauuggguuccgaauccuccuc

SEQ ID NO: 49815 - RNA, 18 nt, Artificial Sequence
  Synthetic oligonucleotide: TRAC-527
ugugaugucaagcugguc

SEQ ID NO: 49816 - RNA, 19 nt, Artificial Sequence
  Synthetic oligonucleotide: TRAC-528
cugugaugucaagcugguc

SEQ ID NO: 49817 - RNA, 20 nt, Artificial Sequence
  Synthetic oligonucleotide: TRAC-529
ccugugaugucaagcugguc

SEQ ID NO: 49818 - RNA, 21 nt, Artificial Sequence
  Synthetic oligonucleotide: TRAC-530
uccugugaugucaagcugguc

SEQ ID NO: 49819 - RNA, 22 nt, Artificial Sequence
  Synthetic oligonucleotide: TRAC-531
uuccugugaugucaagcugguc

SEQ ID NO: 49820 - RNA, 23 nt, Artificial Sequence
  Synthetic oligonucleotide: TRAC-532
guuccugugaugucaagcugguc

SEQ ID NO: 49821 - RNA, 24 nt, Artificial Sequence
  Synthetic oligonucleotide: TRAC-533
aguuccugugaugucaagcugguc

SEQ ID NO: 49822 - RNA, 18 nt, Artificial Sequence
  Synthetic oligonucleotide: TRAC-534
ucaacaacagcauuauuc

SEQ ID NO: 49823 - RNA, 19 nt, Artificial Sequence
  Synthetic oligonucleotide: TRAC-535
uucaacaacagcauuauuc

SEQ ID NO: 49824 - RNA, 20 nt, Artificial Sequence
  Synthetic oligonucleotide: TRAC-536
cuucaacaacagcauuauuc

SEQ ID NO: 49825 - RNA, 21 nt, Artificial Sequence
  Synthetic oligonucleotide: TRAC-537
ccuucaacaacagcauuauuc

SEQ ID NO: 49826 - RNA, 22 nt, Artificial Sequence
  Synthetic oligonucleotide: TRAC-538
gccuucaacaacagcauuauuc

SEQ ID NO: 49827 - RNA, 23 nt, Artificial Sequence
  Synthetic oligonucleotide: TRAC-539
cgccuucaacaacagcauuauuc

SEQ ID NO: 49828 - RNA, 24 nt, Artificial Sequence
  Synthetic oligonucleotide: TRAC-540
acgccuucaacaacagcauuauuc

SEQ ID NO: 49829 - RNA, 18 nt, Artificial Sequence
  Synthetic oligonucleotide: TRAC-541
augaggucuauggacuuc

SEQ ID NO: 49830 - RNA, 19 nt, Artificial Sequence
  Synthetic oligonucleotide: TRAC-542
caugaggucuauggacuuc

SEQ ID NO: 49831 - RNA, 20 nt, Artificial Sequence
  Synthetic oligonucleotide: TRAC-543
acaugaggucuauggacuuc

SEQ ID NO: 49832 - RNA, 21 nt, Artificial Sequence
  Synthetic oligonucleotide: TRAC-544
gacaugaggucuauggacuuc

SEQ ID NO: 49833 - RNA, 22 nt, Artificial Sequence
  Synthetic oligonucleotide: TRAC-545
agacaugaggucuauggacuuc

SEQ ID NO: 49834 - RNA, 23 nt, Artificial Sequence
  Synthetic oligonucleotide: TRAC-546
uagacaugaggucuauggacuuc

SEQ ID NO: 49835 - RNA, 24 nt, Artificial Sequence
  Synthetic oligonucleotide: TRAC-547
cuagacaugaggucuauggacuuc

SEQ ID NO: 49836 - RNA, 18 nt, Artificial Sequence
  Synthetic oligonucleotide: TRAC-548
aggugaggggccuugaag

SEQ ID NO: 49837 - RNA, 19 nt, Artificial Sequence
  Synthetic oligonucleotide: TRAC-549
gaggugaggggccuugaag

SEQ ID NO: 49838 - RNA, 20 nt, Artificial Sequence
  Synthetic oligonucleotide: TRAC-550
ugaggugaggggccuugaag

SEQ ID NO: 49839 - RNA, 21 nt, Artificial Sequence
  Synthetic oligonucleotide: TRAC-551
cugaggugaggggccuugaag

SEQ ID NO: 49840 - RNA, 22 nt, Artificial Sequence
  Synthetic oligonucleotide: TRAC-552
gcugaggugaggggccuugaag

SEQ ID NO: 49841 - RNA, 23 nt, Artificial Sequence
  Synthetic oligonucleotide: TRAC-553
agcugaggugaggggccuugaag

SEQ ID NO: 49842 - RNA, 24 nt, Artificial Sequence
  Synthetic oligonucleotide: TRAC-554
cagcugaggugaggggccuugaag

SEQ ID NO: 49843 - RNA, 18 nt, Artificial Sequence
  Synthetic oligonucleotide: TRAC-555
gacccugccguguaccag

SEQ ID NO: 49844 - RNA, 19 nt, Artificial Sequence
  Synthetic oligonucleotide: TRAC-556
ugacccugccguguaccag

SEQ ID NO: 49845 - RNA, 20 nt, Artificial Sequence
  Synthetic oligonucleotide: TRAC-557
cugacccugccguguaccag

SEQ ID NO: 49846 - RNA, 21 nt, Artificial Sequence
  Synthetic oligonucleotide: TRAC-558
ccugacccugccguguaccag

SEQ ID NO: 49847 - RNA, 22 nt, Artificial Sequence
  Synthetic oligonucleotide: TRAC-559
cccugacccugccguguaccag

SEQ ID NO: 49848 - RNA, 23 nt, Artificial Sequence
  Synthetic oligonucleotide: TRAC-560
acccugacccugccguguaccag

SEQ ID NO: 49849 - RNA, 24 nt, Artificial Sequence
  Synthetic oligonucleotide: TRAC-561
aacccugacccugccguguaccag

SEQ ID NO: 49850 - RNA, 18 nt, Artificial Sequence
  Synthetic oligonucleotide: TRAC-562
gcugcggcugugguccag

SEQ ID NO: 49851 - RNA, 19 nt, Artificial Sequence
  Synthetic oligonucleotide: TRAC-563
cgcugcggcugugguccag

SEQ ID NO: 49852 - RNA, 20 nt, Artificial Sequence
  Synthetic oligonucleotide: TRAC-564
acgcugcggcugugguccag

SEQ ID NO: 49853 - RNA, 21 nt, Artificial Sequence
  Synthetic oligonucleotide: TRAC-565
gacgcugcggcugugguccag

SEQ ID NO: 49854 - RNA, 22 nt, Artificial Sequence
  Synthetic oligonucleotide: TRAC-566
ugacgcugcggcugugguccag

SEQ ID NO: 49855 - RNA, 23 nt, Artificial Sequence
  Synthetic oligonucleotide: TRAC-567
augacgcugcggcugugguccag

SEQ ID NO: 49856 - RNA, 24 nt, Artificial Sequence
  Synthetic oligonucleotide: TRAC-568
caugacgcugcggcugugguccag

SEQ ID NO: 49857 - RNA, 18 nt, Artificial Sequence
  Synthetic oligonucleotide: TRAC-569
ggcugugguccagcugag

SEQ ID NO: 49858 - RNA, 19 nt, Artificial Sequence
  Synthetic oligonucleotide: TRAC-570
cggcugugguccagcugag

SEQ ID NO: 49859 - RNA, 20 nt, Artificial Sequence
  Synthetic oligonucleotide: TRAC-571
gcggcugugguccagcugag

SEQ ID NO: 49860 - RNA, 21 nt, Artificial Sequence
  Synthetic oligonucleotide: TRAC-572
ugcggcugugguccagcugag

SEQ ID NO: 49861 - RNA, 22 nt, Artificial Sequence
  Synthetic oligonucleotide: TRAC-573
cugcggcugugguccagcugag

SEQ ID NO: 49862 - RNA, 23 nt, Artificial Sequence
  Synthetic oligonucleotide: TRAC-574
gcugcggcugugguccagcugag

SEQ ID NO: 49863 - RNA, 24 nt, Artificial Sequence
  Synthetic oligonucleotide: TRAC-575
cgcugcggcugugguccagcugag

SEQ ID NO: 49864 - RNA, 18 nt, Artificial Sequence
  Synthetic oligonucleotide: TRAC-576
ccugugaugucaagcugg

SEQ ID NO: 49865 - RNA, 19 nt, Artificial Sequence
  Synthetic oligonucleotide: TRAC-577
uccugugaugucaagcugg

SEQ ID NO: 49866 - RNA, 20 nt, Artificial Sequence
  Synthetic oligonucleotide: TRAC-578
uuccugugaugucaagcugg

SEQ ID NO: 49867 - RNA, 21 nt, Artificial Sequence
  Synthetic oligonucleotide: TRAC-579
guuccugugaugucaagcugg

SEQ ID NO: 49868 - RNA, 22 nt, Artificial Sequence
  Synthetic oligonucleotide: TRAC-580
aguuccugugaugucaagcugg

SEQ ID NO: 49869 - RNA, 23 nt, Artificial Sequence
  Synthetic oligonucleotide: TRAC-581
aaguuccugugaugucaagcugg

SEQ ID NO: 49870 - RNA, 24 nt, Artificial Sequence
  Synthetic oligonucleotide: TRAC-582
aaaguuccugugaugucaagcugg

SEQ ID NO: 49871 - RNA, 18 nt, Artificial Sequence
  Synthetic oligonucleotide: TRAC-583
ugugguccagcugaggug

SEQ ID NO: 49872 - RNA, 19 nt, Artificial Sequence
  Synthetic oligonucleotide: TRAC-584
cugugguccagcugaggug

SEQ ID NO: 49873 - RNA, 20 nt, Artificial Sequence
  Synthetic oligonucleotide: TRAC-131
gcugugguccagcugaggug

SEQ ID NO: 49874 - RNA, 21 nt, Artificial Sequence
  Synthetic oligonucleotide: TRAC-585
ggcugugguccagcugaggug

SEQ ID NO: 49875 - RNA, 22 nt, Artificial Sequence
  Synthetic oligonucleotide: TRAC-586
cggcugugguccagcugaggug

SEQ ID NO: 49876 - RNA, 23 nt, Artificial Sequence
  Synthetic oligonucleotide: TRAC-587
gcggcugugguccagcugaggug

SEQ ID NO: 49877 - RNA, 24 nt, Artificial Sequence
  Synthetic oligonucleotide: TRAC-588
ugcggcugugguccagcugaggug

SEQ ID NO: 49878 - RNA, 18 nt, Artificial Sequence
  Synthetic oligonucleotide: TRAC-589
ccucuugguuuuacagau

SEQ ID NO: 49879 - RNA, 19 nt, Artificial Sequence
  Synthetic oligonucleotide: TRAC-590
gccucuugguuuuacagau

SEQ ID NO: 49880 - RNA, 20 nt, Artificial Sequence
  Synthetic oligonucleotide: TRAC-591
ggccucuugguuuuacagau

SEQ ID NO: 49881 - RNA, 21 nt, Artificial Sequence
  Synthetic oligonucleotide: TRAC-592
uggccucuugguuuuacagau

SEQ ID NO: 49882 - RNA, 22 nt, Artificial Sequence
  Synthetic oligonucleotide: TRAC-593
guggccucuugguuuuacagau

SEQ ID NO: 49883 - RNA, 23 nt, Artificial Sequence
  Synthetic oligonucleotide: TRAC-594
uguggccucuugguuuuacagau

SEQ ID NO: 49884 - RNA, 24 nt, Artificial Sequence
  Synthetic oligonucleotide: TRAC-595
cuguggccucuugguuuuacagau

SEQ ID NO: 49885 - RNA, 18 nt, Artificial Sequence
  Synthetic oligonucleotide: TRAC-596
agcuggucgagaaaagcu

SEQ ID NO: 49886 - RNA, 19 nt, Artificial Sequence
  Synthetic oligonucleotide: TRAC-597
aagcuggucgagaaaagcu

SEQ ID NO: 49887 - RNA, 20 nt, Artificial Sequence
  Synthetic oligonucleotide: TRAC-598
caagcuggucgagaaaagcu

SEQ ID NO: 49888 - RNA, 21 nt, Artificial Sequence
  Synthetic oligonucleotide: TRAC-599
ucaagcuggucgagaaaagcu

SEQ ID NO: 49889 - RNA, 22 nt, Artificial Sequence
  Synthetic oligonucleotide: TRAC-600
gucaagcuggucgagaaaagcu

SEQ ID NO: 49890 - RNA, 23 nt, Artificial Sequence
  Synthetic oligonucleotide: TRAC-601
ugucaagcuggucgagaaaagcu

SEQ ID NO: 49891 - RNA, 24 nt, Artificial Sequence
  Synthetic oligonucleotide: TRAC-602
augucaagcuggucgagaaaagcu

SEQ ID NO: 49892 - RNA, 18 nt, Artificial Sequence
  Synthetic oligonucleotide: TRAC-603
cccugccguguaccagcu

SEQ ID NO: 49893 - RNA, 19 nt, Artificial Sequence
  Synthetic oligonucleotide: TRAC-604
acccugccguguaccagcu

SEQ ID NO: 49894 - RNA, 20 nt, Artificial Sequence
  Synthetic oligonucleotide: TRAC-605
gacccugccguguaccagcu

SEQ ID NO: 49895 - RNA, 21 nt, Artificial Sequence
  Synthetic oligonucleotide: TRAC-606
ugacccugccguguaccagcu

SEQ ID NO: 49896 - RNA, 22 nt, Artificial Sequence
  Synthetic oligonucleotide: TRAC-607
cugacccugccguguaccagcu

SEQ ID NO: 49897 - RNA, 23 nt, Artificial Sequence
  Synthetic oligonucleotide: TRAC-608
ccugacccugccguguaccagcu

SEQ ID NO: 49898 - RNA, 24 nt, Artificial Sequence
  Synthetic oligonucleotide: TRAC-609
cccugacccugccguguaccagcu

SEQ ID NO: 49899 - RNA, 18 nt, Artificial Sequence
  Synthetic oligonucleotide: TRAC-610
gugcuagacaugaggucu

SEQ ID NO: 49900 - RNA, 19 nt, Artificial Sequence
  Synthetic oligonucleotide: TRAC-611
ugugcuagacaugaggucu

SEQ ID NO: 49901 - RNA, 20 nt, Artificial Sequence
  Synthetic oligonucleotide: TRAC-612
cugugcuagacaugaggucu

SEQ ID NO: 49902 - RNA, 21 nt, Artificial Sequence
  Synthetic oligonucleotide: TRAC-613
acugugcuagacaugaggucu

SEQ ID NO: 49903 - RNA, 22 nt, Artificial Sequence
  Synthetic oligonucleotide: TRAC-614
aacugugcuagacaugaggucu

SEQ ID NO: 49904 - RNA, 23 nt, Artificial Sequence
  Synthetic oligonucleotide: TRAC-615
aaacugugcuagacaugaggucu

SEQ ID NO: 49905 - RNA, 24 nt, Artificial Sequence
  Synthetic oligonucleotide: TRAC-616
aaaacugugcuagacaugaggucu

SEQ ID NO: 49906 - RNA, 18 nt, Artificial Sequence
  Synthetic oligonucleotide: TRAC-617
uucuuccccagcccaggu

SEQ ID NO: 49907 - RNA, 19 nt, Artificial Sequence
  Synthetic oligonucleotide: TRAC-618
cuucuuccccagcccaggu

SEQ ID NO: 49908 - RNA, 20 nt, Artificial Sequence
  Synthetic oligonucleotide: TRAC-619
ccuucuuccccagcccaggu

SEQ ID NO: 49909 - RNA, 21 nt, Artificial Sequence
  Synthetic oligonucleotide: TRAC-620
accuucuuccccagcccaggu

SEQ ID NO: 49910 - RNA, 22 nt, Artificial Sequence
  Synthetic oligonucleotide: TRAC-621
caccuucuuccccagcccaggu

SEQ ID NO: 49911 - RNA, 23 nt, Artificial Sequence
  Synthetic oligonucleotide: TRAC-622
acaccuucuuccccagcccaggu

SEQ ID NO: 49912 - RNA, 24 nt, Artificial Sequence
  Synthetic oligonucleotide: TRAC-623
gacaccuucuuccccagcccaggu

SEQ ID NO: 49913 - RNA, 18 nt, Artificial Sequence
  Synthetic oligonucleotide: TRAC-624
cugugguccagcugaggu

SEQ ID NO: 49914 - RNA, 19 nt, Artificial Sequence
  Synthetic oligonucleotide: TRAC-625
gcugugguccagcugaggu

SEQ ID NO: 49915 - RNA, 20 nt, Artificial Sequence
  Synthetic oligonucleotide: TRAC-626
ggcugugguccagcugaggu

SEQ ID NO: 49916 - RNA, 21 nt, Artificial Sequence
  Synthetic oligonucleotide: TRAC-627
cggcugugguccagcugaggu

SEQ ID NO: 49917 - RNA, 22 nt, Artificial Sequence
  Synthetic oligonucleotide: TRAC-628
gcggcugugguccagcugaggu

SEQ ID NO: 49918 - RNA, 23 nt, Artificial Sequence
  Synthetic oligonucleotide: TRAC-629
ugcggcugugguccagcugaggu

SEQ ID NO: 49919 - RNA, 24 nt, Artificial Sequence
  Synthetic oligonucleotide: TRAC-630
cugcggcugugguccagcugaggu

SEQ ID NO: 49920 - RNA, 18 nt, Artificial Sequence
  Synthetic oligonucleotide: TRAC-631
aaugucuguuuuuccuuu

SEQ ID NO: 49921 - RNA, 19 nt, Artificial Sequence
  Synthetic oligonucleotide: TRAC-632
gaaugucuguuuuuccuuu

SEQ ID NO: 49922 - RNA, 20 nt, Artificial Sequence
  Synthetic oligonucleotide: TRAC-633
agaaugucuguuuuuccuuu

SEQ ID NO: 49923 - RNA, 21 nt, Artificial Sequence
  Synthetic oligonucleotide: TRAC-634
aagaaugucuguuuuuccuuu

SEQ ID NO: 49924 - RNA, 22 nt, Artificial Sequence
  Synthetic oligonucleotide: TRAC-635
aaagaaugucuguuuuuccuuu

SEQ ID NO: 49925 - RNA, 23 nt, Artificial Sequence
  Synthetic oligonucleotide: TRAC-636
gaaagaaugucuguuuuuccuuu

SEQ ID NO: 49926 - RNA, 24 nt, Artificial Sequence
  Synthetic oligonucleotide: TRAC-637
ugaaagaaugucuguuuuuccuuu

SEQ ID NO: 49927 - RNA, 17 nt, Artificial Sequence
  Synthetic oligonucleotide: TRAC-638
gcguuugcacaugcaaa

SEQ ID NO: 49928 - RNA, 17 nt, Artificial Sequence
  Synthetic oligonucleotide: TRAC-639
gucugccuauucaccga

SEQ ID NO: 49929 - RNA, 17 nt, Artificial Sequence
  Synthetic oligonucleotide: TRAC-640
cccggccacuuucagga

SEQ ID NO: 49930 - RNA, 17 nt, Artificial Sequence
  Synthetic oligonucleotide: TRAC-641
aggcagacagacuuguc

SEQ ID NO: 49931 - RNA, 17 nt, Artificial Sequence
  Synthetic oligonucleotide: TRAC-642
acaaaugugucacaaag

SEQ ID NO: 49932 - RNA, 17 nt, Artificial Sequence
  Synthetic oligonucleotide: TRAC-643
uccccagcccagguaag

SEQ ID NO: 49933 - RNA, 17 nt, Artificial Sequence
  Synthetic oligonucleotide: TRAC-644
augucaagcuggucgag

SEQ ID NO: 49934 - RNA, 17 nt, Artificial Sequence
  Synthetic oligonucleotide: TRAC-645
uuucaaagcuuuucucg

SEQ ID NO: 49935 - RNA, 17 nt, Artificial Sequence
  Synthetic oligonucleotide: TRAC-646
acagccgcagcgucaug

SEQ ID NO: 49936 - RNA, 17 nt, Artificial Sequence
  Synthetic oligonucleotide: TRAC-647
aaacuuucaaaaccugu

SEQ ID NO: 49937 - RNA, 17 nt, Artificial Sequence
  Synthetic oligonucleotide: TRAC-648
aagucugucugccuauu

SEQ ID NO: 49938 - RNA, 17 nt, Artificial Sequence
  Synthetic oligonucleotide: TRAC-649
cccugucuuaccuguuu

SEQ ID NO: 49939 - RNA, 20 nt, Artificial Sequence
  Synthetic oligonucleotide: TRAC-650
aaggcguuugcacaugcaaa

SEQ ID NO: 49940 - RNA, 20 nt, Artificial Sequence
  Synthetic oligonucleotide: TRAC-651
ucugucugccuauucaccga

SEQ ID NO: 49941 - RNA, 20 nt, Artificial Sequence
  Synthetic oligonucleotide: TRAC-652
aaacccggccacuuucagga

SEQ ID NO: 49942 - RNA, 20 nt, Artificial Sequence
  Synthetic oligonucleotide: TRAC-653
aauaggcagacagacuuguc

SEQ ID NO: 49943 - RNA, 20 nt, Artificial Sequence
  Synthetic oligonucleotide: TRAC-654
caaacaaaugugucacaaag

SEQ ID NO: 49944 - RNA, 20 nt, Artificial Sequence
  Synthetic oligonucleotide: TRAC-655
ucuuccccagcccagguaag

SEQ ID NO: 49945 - RNA, 20 nt, Artificial Sequence
  Synthetic oligonucleotide: TRAC-656
gugaugucaagcuggucgag

SEQ ID NO: 49946 - RNA, 20 nt, Artificial Sequence
  Synthetic oligonucleotide: TRAC-657
cuguuucaaagcuuuucucg

SEQ ID NO: 49947 - RNA, 20 nt, Artificial Sequence
  Synthetic oligonucleotide: TRAC-658
accacagccgcagcgucaug

SEQ ID NO: 49948 - RNA, 20 nt, Artificial Sequence
  Synthetic oligonucleotide: TRAC-659
gacaagucugucugccuauu

SEQ ID NO: 49949 - RNA, 20 nt, Artificial Sequence
  Synthetic oligonucleotide: TRAC-660
gaccccugucuuaccuguuu

SEQ ID NO: 49950 - RNA, 20 nt, Artificial Sequence
  Synthetic oligonucleotide: TRAC-661
ccuaaacuuucaaaaccugu

SEQ ID NO: 49951 - RNA, 17 nt, Artificial Sequence
  Synthetic oligonucleotide: TRBC-1
cauggccaucagcacga

SEQ ID NO: 49952 - RNA, 17 nt, Artificial Sequence
  Synthetic oligonucleotide: TRBC-2
ggcgggcugcuccuuga

SEQ ID NO: 49953 - RNA, 17 nt, Artificial Sequence
  Synthetic oligonucleotide: TRBC-3
cgaguggacccaggaua

SEQ ID NO: 49954 - RNA, 17 nt, Artificial Sequence
  Synthetic oligonucleotide: TRBC-4
caccuuguaugccgugc

SEQ ID NO: 49955 - RNA, 17 nt, Artificial Sequence
  Synthetic oligonucleotide: TRBC-5
acagcggaagugguugc

SEQ ID NO: 49956 - RNA, 17 nt, Artificial Sequence
  Synthetic oligonucleotide: TRBC-6
ccucggcgcugacgauc

SEQ ID NO: 49957 - RNA, 17 nt, Artificial Sequence
  Synthetic oligonucleotide: TRBC-7
ucaaacacagcgaccuc

SEQ ID NO: 49958 - RNA, 17 nt, Artificial Sequence
  Synthetic oligonucleotide: TRBC-8
guuuuggagcuagccuc

SEQ ID NO: 49959 - RNA, 17 nt, Artificial Sequence
  Synthetic oligonucleotide: TRBC-9
ggacuugacagcggaag

SEQ ID NO: 49960 - RNA, 17 nt, Artificial Sequence
  Synthetic oligonucleotide: TRBC-10
ucucggagaaugacgag

SEQ ID NO: 49961 - RNA, 17 nt, Artificial Sequence
  Synthetic oligonucleotide: TRBC-11
cuucuaccccgaccacg

SEQ ID NO: 49962 - RNA, 17 nt, Artificial Sequence
  Synthetic oligonucleotide: TRBC-12
aaacguguucccacccg

SEQ ID NO: 49963 - RNA, 17 nt, Artificial Sequence
  Synthetic oligonucleotide: TRBC-13
cagcggaagugguugcg

SEQ ID NO: 49964 - RNA, 17 nt, Artificial Sequence
  Synthetic oligonucleotide: TRBC-14
cagcacggcauacaagg

SEQ ID NO: 49965 - RNA, 17 nt, Artificial Sequence
  Synthetic oligonucleotide: TRBC-15
agcggaagugguugcgg

SEQ ID NO: 49966 - RNA, 17 nt, Artificial Sequence
  Synthetic oligonucleotide: TRBC-16
aacacagcgaccucggg

SEQ ID NO: 49967 - RNA, 17 nt, Artificial Sequence
  Synthetic oligonucleotide: TRBC-17
cucaaacacagcgaccu

SEQ ID NO: 49968 - RNA, 17 nt, Artificial Sequence
  Synthetic oligonucleotide: TRBC-18
cucggcgcugacgaucu

SEQ ID NO: 49969 - RNA, 17 nt, Artificial Sequence
  Synthetic oligonucleotide: TRBC-19
acacagcgaccucgggu

SEQ ID NO: 49970 - RNA, 20 nt, Artificial Sequence
  Synthetic oligonucleotide: TRBC-20
acugaccagcacggcauaca

SEQ ID NO: 49971 - RNA, 20 nt, Artificial Sequence
  Synthetic oligonucleotide: TRBC-21
cacgagggcacugaccagca

SEQ ID NO: 49972 - RNA, 20 nt, Artificial Sequence
  Synthetic oligonucleotide: TRBC-22
ucaacagagucuuaccagca

SEQ ID NO: 49973 - RNA, 20 nt, Artificial Sequence
  Synthetic oligonucleotide: TRBC-23
uaccauggccaucagcacga

SEQ ID NO: 49974 - RNA, 20 nt, Artificial Sequence
  Synthetic oligonucleotide: TRBC-24
cugccugagcagccgccuga

SEQ ID NO: 49975 - RNA, 20 nt, Artificial Sequence
  Synthetic oligonucleotide: TRBC-25
ugacgaguggacccaggaua

SEQ ID NO: 49976 - RNA, 20 nt, Artificial Sequence
  Synthetic oligonucleotide: TRBC-26
cgcugucaaguccaguucua

SEQ ID NO: 49977 - RNA, 20 nt, Artificial Sequence
  Synthetic oligonucleotide: TRBC-27
ucgugcugauggccauggua

SEQ ID NO: 49978 - RNA, 20 nt, Artificial Sequence
  Synthetic oligonucleotide: TRBC-28
acacuggugugccuggccac

SEQ ID NO: 49979 - RNA, 20 nt, Artificial Sequence
  Synthetic oligonucleotide: TRBC-29
ggccaccuuguaugccgugc

SEQ ID NO: 49980 - RNA, 20 nt, Artificial Sequence
  Synthetic oligonucleotide: TRBC-30
uugacagcggaagugguugc

SEQ ID NO: 49981 - RNA, 20 nt, Artificial Sequence
  Synthetic oligonucleotide: TRBC-31
aacacguuuuucagguccuc

SEQ ID NO: 49982 - RNA, 20 nt, Artificial Sequence
  Synthetic oligonucleotide: TRBC-32
cgggugggaacacguuuuuc

SEQ ID NO: 49983 - RNA, 20 nt, Artificial Sequence
  Synthetic oligonucleotide: TRBC-33
acuggacuugacagcggaag

SEQ ID NO: 49984 - RNA, 20 nt, Artificial Sequence
  Synthetic oligonucleotide: TRBC-34
cguagaacuggacuugacag

SEQ ID NO: 49985 - RNA, 20 nt, Artificial Sequence
  Synthetic oligonucleotide: TRBC-35
ggcucucggagaaugacgag

SEQ ID NO: 49986 - RNA, 20 nt, Artificial Sequence
  Synthetic oligonucleotide: TRBC-36
agggcgggcugcuccuugag

SEQ ID NO: 49987 - RNA, 20 nt, Artificial Sequence
  Synthetic oligonucleotide: TRBC-37
ucccuagcaagaucucauag

SEQ ID NO: 49988 - RNA, 20 nt, Artificial Sequence
  Synthetic oligonucleotide: TRBC-38
aggcuucuaccccgaccacg

SEQ ID NO: 49989 - RNA, 20 nt, Artificial Sequence
  Synthetic oligonucleotide: TRBC-39
gaaaaacguguucccacccg

SEQ ID NO: 49990 - RNA, 20 nt, Artificial Sequence
  Synthetic oligonucleotide: TRBC-40
cacccagaucgucagcgccg

SEQ ID NO: 49991 - RNA, 20 nt, Artificial Sequence
  Synthetic oligonucleotide: TRBC-41
ugacagcggaagugguugcg

SEQ ID NO: 49992 - RNA, 20 nt, Artificial Sequence
  Synthetic oligonucleotide: TRBC-42
gaccagcacggcauacaagg

SEQ ID NO: 49993 - RNA, 20 nt, Artificial Sequence
  Synthetic oligonucleotide: TRBC-43
gcggggguucugccagaagg

SEQ ID NO: 49994 - RNA, 20 nt, Artificial Sequence
  Synthetic oligonucleotide: TRBC-44
gacagcggaagugguugcgg

SEQ ID NO: 49995 - RNA, 20 nt, Artificial Sequence
  Synthetic oligonucleotide: TRBC-45
ucaaacacagcgaccucggg

SEQ ID NO: 49996 - RNA, 20 nt, Artificial Sequence
  Synthetic oligonucleotide: TRBC-46
guggucgggguagaagccug

SEQ ID NO: 49997 - RNA, 20 nt, Artificial Sequence
  Synthetic oligonucleotide: TRBC-47
aucgucagcgccgaggccug

SEQ ID NO: 49998 - RNA, 20 nt, Artificial Sequence
  Synthetic oligonucleotide: TRBC-48
cuugacagcggaagugguug

SEQ ID NO: 49999 - RNA, 20 nt, Artificial Sequence
  Synthetic oligonucleotide: TRBC-49
augacgaguggacccaggau

SEQ ID NO: 50000 - RNA, 20 nt, Artificial Sequence
  Synthetic oligonucleotide: TRBC-50
ggccucggcgcugacgaucu

SEQ ID NO: 50001 - RNA, 20 nt, Artificial Sequence
  Synthetic oligonucleotide: TRBC-51
aguccaguucuacgggcucu

SEQ ID NO: 50002 - RNA, 20 nt, Artificial Sequence
  Synthetic oligonucleotide: TRBC-52
caaacacagcgaccucgggu

SEQ ID NO: 50003 - RNA, 17 nt, Artificial Sequence
  Synthetic oligonucleotide: TRBC-53
aaacaggggaagaaaaa

SEQ ID NO: 50004 - RNA, 17 nt, Artificial Sequence
  Synthetic oligonucleotide: TRBC-54
gaucucccacacccaaa

SEQ ID NO: 50005 - RNA, 17 nt, Artificial Sequence
  Synthetic oligonucleotide: TRBC-55
uucagguccucuggaaa

SEQ ID NO: 50006 - RNA, 17 nt, Artificial Sequence
  Synthetic oligonucleotide: TRBC-56
cagagucuuaccagcaa

SEQ ID NO: 50007 - RNA, 17 nt, Artificial Sequence
  Synthetic oligonucleotide: TRBC-57
uccacaggucaagagaa

SEQ ID NO: 50008 - RNA, 17 nt, Artificial Sequence
  Synthetic oligonucleotide: TRBC-58
uuucagguccucuggaa

SEQ ID NO: 50009 - RNA, 17 nt, Artificial Sequence
  Synthetic oligonucleotide: TRBC-59
cugagcuggugggugaa

SEQ ID NO: 50010 - RNA, 17 nt, Artificial Sequence
  Synthetic oligonucleotide: TRBC-60
ggaaagggaagagguaa

SEQ ID NO: 50011 - RNA, 17 nt, Artificial Sequence
  Synthetic oligonucleotide: TRBC-61
cagucugaaagaaaaca

SEQ ID NO: 50012 - RNA, 17 nt, Artificial Sequence
  Synthetic oligonucleotide: TRBC-62
gaccagcacggcauaca

SEQ ID NO: 50013 - RNA, 17 nt, Artificial Sequence
  Synthetic oligonucleotide: TRBC-63
cacccuccuccuuacca

SEQ ID NO: 50014 - RNA, 17 nt, Artificial Sequence
  Synthetic oligonucleotide: TRBC-64
ccucgugcugauggcca

SEQ ID NO: 50015 - RNA, 17 nt, Artificial Sequence
  Synthetic oligonucleotide: TRBC-65
gagggcacugaccagca

SEQ ID NO: 50016 - RNA, 17 nt, Artificial Sequence
  Synthetic oligonucleotide: TRBC-66
acagagucuuaccagca

SEQ ID NO: 50017 - RNA, 17 nt, Artificial Sequence
  Synthetic oligonucleotide: TRBC-67
agacccgcagccccuca

SEQ ID NO: 50018 - RNA, 17 nt, Artificial Sequence
  Synthetic oligonucleotide: TRBC-68
aagagagaacauuuuca

SEQ ID NO: 50019 - RNA, 17 nt, Artificial Sequence
  Synthetic oligonucleotide: TRBC-69
gcggggguucugccaga

SEQ ID NO: 50020 - RNA, 17 nt, Artificial Sequence
  Synthetic oligonucleotide: TRBC-70
caagaucucauagagga

SEQ ID NO: 50021 - RNA, 17 nt, Artificial Sequence
  Synthetic oligonucleotide: TRBC-71
ggccaugguaaggagga

SEQ ID NO: 50022 - RNA, 17 nt, Artificial Sequence
  Synthetic oligonucleotide: TRBC-72
ugagaucuugcuaggga

SEQ ID NO: 50023 - RNA, 17 nt, Artificial Sequence
  Synthetic oligonucleotide: TRBC-73
cuggugggugaauggga

SEQ ID NO: 50024 - RNA, 17 nt, Artificial Sequence
  Synthetic oligonucleotide: TRBC-74
ugaagaaugaccuggga

SEQ ID NO: 50025 - RNA, 17 nt, Artificial Sequence
  Synthetic oligonucleotide: TRBC-75
ccugagcagccgccuga

SEQ ID NO: 50026 - RNA, 17 nt, Artificial Sequence
  Synthetic oligonucleotide: TRBC-76
cagugcccucgugcuga

SEQ ID NO: 50027 - RNA, 17 nt, Artificial Sequence
  Synthetic oligonucleotide: TRBC-77
gagaucucugcuucuga

SEQ ID NO: 50028 - RNA, 17 nt, Artificial Sequence
  Synthetic oligonucleotide: TRBC-78
guaucuggagucauuga

SEQ ID NO: 50029 - RNA, 17 nt, Artificial Sequence
  Synthetic oligonucleotide: TRBC-79
aggaggagggugggaua

SEQ ID NO: 50030 - RNA, 17 nt, Artificial Sequence
  Synthetic oligonucleotide: TRBC-80
aagagguaauggggcua

SEQ ID NO: 50031 - RNA, 17 nt, Artificial Sequence
  Synthetic oligonucleotide: TRBC-81
ucuaugagaucuugcua

SEQ ID NO: 50032 - RNA, 17 nt, Artificial Sequence
  Synthetic oligonucleotide: TRBC-82
ugucaaguccaguucua

SEQ ID NO: 50033 - RNA, 17 nt, Artificial Sequence
  Synthetic oligonucleotide: TRBC-83
ugcugauggccauggua

SEQ ID NO: 50034 - RNA, 17 nt, Artificial Sequence
  Synthetic oligonucleotide: TRBC-84
acagucugaaagaaaac

SEQ ID NO: 50035 - RNA, 17 nt, Artificial Sequence
  Synthetic oligonucleotide: TRBC-85
ccgagagcccguagaac

SEQ ID NO: 50036 - RNA, 17 nt, Artificial Sequence
  Synthetic oligonucleotide: TRBC-86
cacccaaaaggccacac

SEQ ID NO: 50037 - RNA, 17 nt, Artificial Sequence
  Synthetic oligonucleotide: TRBC-87
cuggugugccuggccac

SEQ ID NO: 50038 - RNA, 17 nt, Artificial Sequence
  Synthetic oligonucleotide: TRBC-88
aauguucucucuuccac

SEQ ID NO: 50039 - RNA, 17 nt, Artificial Sequence
  Synthetic oligonucleotide: TRBC-89
agaggaugguggcagac

SEQ ID NO: 50040 - RNA, 17 nt, Artificial Sequence
  Synthetic oligonucleotide: TRBC-90
cugacgaucugggugac

SEQ ID NO: 50041 - RNA, 17 nt, Artificial Sequence
  Synthetic oligonucleotide: TRBC-91
gucaaguccaguucuac

SEQ ID NO: 50042 - RNA, 17 nt, Artificial Sequence
  Synthetic oligonucleotide: TRBC-92
aggagagacucacuuac

SEQ ID NO: 50043 - RNA, 17 nt, Artificial Sequence
  Synthetic oligonucleotide: TRBC-93
gaaugacgaguggaccc

SEQ ID NO: 50044 - RNA, 17 nt, Artificial Sequence
  Synthetic oligonucleotide: TRBC-94
cucaccugcucuacccc

SEQ ID NO: 50045 - RNA, 17 nt, Artificial Sequence
  Synthetic oligonucleotide: TRBC-95
ccuccaggcaucucccc

SEQ ID NO: 50046 - RNA, 17 nt, Artificial Sequence
  Synthetic oligonucleotide: TRBC-96
agcuccaaaaccauccc

SEQ ID NO: 50047 - RNA, 17 nt, Artificial Sequence
  Synthetic oligonucleotide: TRBC-97
ucgucagcgccgaggcc

SEQ ID NO: 50048 - RNA, 17 nt, Artificial Sequence
  Synthetic oligonucleotide: TRBC-98
agcaggugaguggggcc

SEQ ID NO: 50049 - RNA, 17 nt, Artificial Sequence
  Synthetic oligonucleotide: TRBC-99
gguagaagccuguggcc

SEQ ID NO: 50050 - RNA, 17 nt, Artificial Sequence
  Synthetic oligonucleotide: TRBC-100
gggccuggggagaugcc

SEQ ID NO: 50051 - RNA, 17 nt, Artificial Sequence
  Synthetic oligonucleotide: TRBC-101
ggccacacuggugugcc

SEQ ID NO: 50052 - RNA, 17 nt, Artificial Sequence
  Synthetic oligonucleotide: TRBC-102
cagguuuggcccuaucc

SEQ ID NO: 50053 - RNA, 17 nt, Artificial Sequence
  Synthetic oligonucleotide: TRBC-103
gaggccugggguagagc

SEQ ID NO: 50054 - RNA, 17 nt, Artificial Sequence
  Synthetic oligonucleotide: TRBC-104
accacguggagcugagc

SEQ ID NO: 50055 - RNA, 17 nt, Artificial Sequence
  Synthetic oligonucleotide: TRBC-105
cuggagucauugagggc

SEQ ID NO: 50056 - RNA, 17 nt, Artificial Sequence
  Synthetic oligonucleotide: TRBC-106
gcuccuugaggggcugc

SEQ ID NO: 50057 - RNA, 17 nt, Artificial Sequence
  Synthetic oligonucleotide: TRBC-107
cagacaggaccccuugc

SEQ ID NO: 50058 - RNA, 17 nt, Artificial Sequence
  Synthetic oligonucleotide: TRBC-108
gcugcucaggcaguauc

SEQ ID NO: 50059 - RNA, 17 nt, Artificial Sequence
  Synthetic oligonucleotide: TRBC-109
gacuguggcuucaccuc

SEQ ID NO: 50060 - RNA, 17 nt, Artificial Sequence
  Synthetic oligonucleotide: TRBC-110
agguggccgagacccuc

SEQ ID NO: 50061 - RNA, 17 nt, Artificial Sequence
  Synthetic oligonucleotide: TRBC-111
acguuuuucagguccuc

SEQ ID NO: 50062 - RNA, 17 nt, Artificial Sequence
  Synthetic oligonucleotide: TRBC-112
cccucaggcggcugcuc

SEQ ID NO: 50063 - RNA, 17 nt, Artificial Sequence
  Synthetic oligonucleotide: TRBC-113
cucagcuccacgugguc

SEQ ID NO: 50064 - RNA, 17 nt, Artificial Sequence
  Synthetic oligonucleotide: TRBC-114
gggucucggccaccuuc

SEQ ID NO: 50065 - RNA, 17 nt, Artificial Sequence
  Synthetic oligonucleotide: TRBC-115
gaagagagaacauuuuc

SEQ ID NO: 50066 - RNA, 17 nt, Artificial Sequence
  Synthetic oligonucleotide: TRBC-116
gugggaacacguuuuuc

SEQ ID NO: 50067 - RNA, 17 nt, Artificial Sequence
  Synthetic oligonucleotide: TRBC-117
agagucuuaccagcaag

SEQ ID NO: 50068 - RNA, 17 nt, Artificial Sequence
  Synthetic oligonucleotide: TRBC-118
uccucuggaaagggaag

SEQ ID NO: 50069 - RNA, 17 nt, Artificial Sequence
  Synthetic oligonucleotide: TRBC-119
agucugaaagaaaacag

SEQ ID NO: 50070 - RNA, 17 nt, Artificial Sequence
  Synthetic oligonucleotide: TRBC-120
gggaaggaggugcacag

SEQ ID NO: 50071 - RNA, 17 nt, Artificial Sequence
  Synthetic oligonucleotide: TRBC-121
agaacuggacuugacag

SEQ ID NO: 50072 - RNA, 17 nt, Artificial Sequence
  Synthetic oligonucleotide: TRBC-122
aagagaaaggauuccag

SEQ ID NO: 50073 - RNA, 17 nt, Artificial Sequence
  Synthetic oligonucleotide: TRBC-123
accucuucccuuuccag

SEQ ID NO: 50074 - RNA, 17 nt, Artificial Sequence
  Synthetic oligonucleotide: TRBC-124
gggguagagcaggugag

SEQ ID NO: 50075 - RNA, 17 nt, Artificial Sequence
  Synthetic oligonucleotide: TRBC-125
gcgggcugcuccuugag

SEQ ID NO: 50076 - RNA, 17 nt, Artificial Sequence
  Synthetic oligonucleotide: TRBC-126
cuagcaagaucucauag

SEQ ID NO: 50077 - RNA, 17 nt, Artificial Sequence
  Synthetic oligonucleotide: TRBC-127
accagcucagcuccacg

SEQ ID NO: 50078 - RNA, 17 nt, Artificial Sequence
  Synthetic oligonucleotide: TRBC-128
ccauggccaucagcacg

SEQ ID NO: 50079 - RNA, 17 nt, Artificial Sequence
  Synthetic oligonucleotide: TRBC-129
ccagaucgucagcgccg

SEQ ID NO: 50080 - RNA, 17 nt, Artificial Sequence
  Synthetic oligonucleotide: TRBC-130
ucagcuccacguggucg

SEQ ID NO: 50081 - RNA, 17 nt, Artificial Sequence
  Synthetic oligonucleotide: TRBC-131
gggguucugccagaagg

SEQ ID NO: 50082 - RNA, 17 nt, Artificial Sequence
  Synthetic oligonucleotide: TRBC-132
gugggugaaugggaagg

SEQ ID NO: 50083 - RNA, 17 nt, Artificial Sequence
  Synthetic oligonucleotide: TRBC-133
ugauggccaugguaagg

SEQ ID NO: 50084 - RNA, 17 nt, Artificial Sequence
  Synthetic oligonucleotide: TRBC-134
uggccgagacccucagg

SEQ ID NO: 50085 - RNA, 17 nt, Artificial Sequence
  Synthetic oligonucleotide: TRBC-135
uggccaugguaaggagg

SEQ ID NO: 50086 - RNA, 17 nt, Artificial Sequence
  Synthetic oligonucleotide: TRBC-136
agagacucacuuaccgg

SEQ ID NO: 50087 - RNA, 17 nt, Artificial Sequence
  Synthetic oligonucleotide: TRBC-137
caugguaaggaggaggg

SEQ ID NO: 50088 - RNA, 17 nt, Artificial Sequence
  Synthetic oligonucleotide: TRBC-138
ucuggagucauugaggg

SEQ ID NO: 50089 - RNA, 17 nt, Artificial Sequence
  Synthetic oligonucleotide: TRBC-139
gaucucauagaggaugg

SEQ ID NO: 50090 - RNA, 17 nt, Artificial Sequence
  Synthetic oligonucleotide: TRBC-140
ccuggggagaugccugg

SEQ ID NO: 50091 - RNA, 17 nt, Artificial Sequence
  Synthetic oligonucleotide: TRBC-141
acguggagcugagcugg

SEQ ID NO: 50092 - RNA, 17 nt, Artificial Sequence
  Synthetic oligonucleotide: TRBC-142
aaagggaagagguaaug

SEQ ID NO: 50093 - RNA, 17 nt, Artificial Sequence
  Synthetic oligonucleotide: TRBC-143
uguuuucuuucagacug

SEQ ID NO: 50094 - RNA, 17 nt, Artificial Sequence
  Synthetic oligonucleotide: TRBC-144
uccuuucucuugaccug

SEQ ID NO: 50095 - RNA, 17 nt, Artificial Sequence
  Synthetic oligonucleotide: TRBC-145
gucgggguagaagccug

SEQ ID NO: 50096 - RNA, 17 nt, Artificial Sequence
  Synthetic oligonucleotide: TRBC-146
gccugagcagccgccug

SEQ ID NO: 50097 - RNA, 17 nt, Artificial Sequence
  Synthetic oligonucleotide: TRBC-147
gucagcgccgaggccug

SEQ ID NO: 50098 - RNA, 17 nt, Artificial Sequence
  Synthetic oligonucleotide: TRBC-148
caggugaguggggccug

SEQ ID NO: 50099 - RNA, 17 nt, Artificial Sequence
  Synthetic oligonucleotide: TRBC-149
ugcuccuugaggggcug

SEQ ID NO: 50100 - RNA, 17 nt, Artificial Sequence
  Synthetic oligonucleotide: TRBC-150
gaaggaggugcacagug

SEQ ID NO: 50101 - RNA, 17 nt, Artificial Sequence
  Synthetic oligonucleotide: TRBC-151
ggccaggcacaccagug

SEQ ID NO: 50102 - RNA, 17 nt, Artificial Sequence
  Synthetic oligonucleotide: TRBC-152
gguagagcaggugagug

SEQ ID NO: 50103 - RNA, 17 nt, Artificial Sequence
  Synthetic oligonucleotide: TRBC-153
guguggccuuuugggug

SEQ ID NO: 50104 - RNA, 17 nt, Artificial Sequence
  Synthetic oligonucleotide: TRBC-154
aguaucuggagucauug

SEQ ID NO: 50105 - RNA, 17 nt, Artificial Sequence
  Synthetic oligonucleotide: TRBC-155
gggcgggcugcuccuug

SEQ ID NO: 50106 - RNA, 17 nt, Artificial Sequence
  Synthetic oligonucleotide: TRBC-156
gacagcggaagugguug

SEQ ID NO: 50107 - RNA, 17 nt, Artificial Sequence
  Synthetic oligonucleotide: TRBC-157
ugagcuggugggugaau

SEQ ID NO: 50108 - RNA, 17 nt, Artificial Sequence
  Synthetic oligonucleotide: TRBC-158
gaaagggaagagguaau

SEQ ID NO: 50109 - RNA, 17 nt, Artificial Sequence
  Synthetic oligonucleotide: TRBC-159
acgaguggacccaggau

SEQ ID NO: 50110 - RNA, 17 nt, Artificial Sequence
  Synthetic oligonucleotide: TRBC-160
aaggaggagggugggau

SEQ ID NO: 50111 - RNA, 17 nt, Artificial Sequence
  Synthetic oligonucleotide: TRBC-161
ugcucuaccccaggccu

SEQ ID NO: 50112 - RNA, 17 nt, Artificial Sequence
  Synthetic oligonucleotide: TRBC-162
cgucagcgccgaggccu

SEQ ID NO: 50113 - RNA, 17 nt, Artificial Sequence
  Synthetic oligonucleotide: TRBC-163
gcaggugaguggggccu

SEQ ID NO: 50114 - RNA, 17 nt, Artificial Sequence
  Synthetic oligonucleotide: TRBC-164
agguuuggcccuauccu

SEQ ID NO: 50115 - RNA, 17 nt, Artificial Sequence
  Synthetic oligonucleotide: TRBC-165
gaagagguaauggggcu

SEQ ID NO: 50116 - RNA, 17 nt, Artificial Sequence
  Synthetic oligonucleotide: TRBC-166
cucuaugagaucuugcu

SEQ ID NO: 50117 - RNA, 17 nt, Artificial Sequence
  Synthetic oligonucleotide: TRBC-167
ccaguucuacgggcucu

SEQ ID NO: 50118 - RNA, 17 nt, Artificial Sequence
  Synthetic oligonucleotide: TRBC-168
cagccgccugagggucu

SEQ ID NO: 50119 - RNA, 17 nt, Artificial Sequence
  Synthetic oligonucleotide: TRBC-169
ggaaggaggugcacagu

SEQ ID NO: 50120 - RNA, 17 nt, Artificial Sequence
  Synthetic oligonucleotide: TRBC-170
ggguagagcaggugagu

SEQ ID NO: 50121 - RNA, 17 nt, Artificial Sequence
  Synthetic oligonucleotide: TRBC-171
augguaaggaggagggu

SEQ ID NO: 50122 - RNA, 17 nt, Artificial Sequence
  Synthetic oligonucleotide: TRBC-172
cguggagcugagcuggu

SEQ ID NO: 50123 - RNA, 17 nt, Artificial Sequence
  Synthetic oligonucleotide: TRBC-173
gcucagcuccacguggu

SEQ ID NO: 50124 - RNA, 17 nt, Artificial Sequence
  Synthetic oligonucleotide: TRBC-174
acaagaacagagcaugu

SEQ ID NO: 50125 - RNA, 17 nt, Artificial Sequence
  Synthetic oligonucleotide: TRBC-175
uguggccuuuugggugu

SEQ ID NO: 50126 - RNA, 17 nt, Artificial Sequence
  Synthetic oligonucleotide: TRBC-176
gaucugggugacagguu

SEQ ID NO: 50127 - RNA, 17 nt, Artificial Sequence
  Synthetic oligonucleotide: TRBC-177
acaccaguguggccuuu

SEQ ID NO: 50128 - RNA, 17 nt, Artificial Sequence
  Synthetic oligonucleotide: TRBC-178
augaccugggaugguuu

SEQ ID NO: 50129 - RNA, 17 nt, Artificial Sequence
  Synthetic oligonucleotide: TRBC-179
caccaguguggccuuuu

SEQ ID NO: 50130 - RNA, 20 nt, Artificial Sequence
  Synthetic oligonucleotide: TRBC-180
agaaaacaggggaagaaaaa

SEQ ID NO: 50131 - RNA, 20 nt, Artificial Sequence
  Synthetic oligonucleotide: TRBC-181
agagaucucccacacccaaa

SEQ ID NO: 50132 - RNA, 20 nt, Artificial Sequence
  Synthetic oligonucleotide: TRBC-182
uuuuucagguccucuggaaa

SEQ ID NO: 50133 - RNA, 20 nt, Artificial Sequence
  Synthetic oligonucleotide: TRBC-183
caacagagucuuaccagcaa

SEQ ID NO: 50134 - RNA, 20 nt, Artificial Sequence
  Synthetic oligonucleotide: TRBC-184
ucuuccacaggucaagagaa

SEQ ID NO: 50135 - RNA, 20 nt, Artificial Sequence
  Synthetic oligonucleotide: TRBC-185
guuuuucagguccucuggaa

SEQ ID NO: 50136 - RNA, 20 nt, Artificial Sequence
  Synthetic oligonucleotide: TRBC-186
gagcugagcuggugggugaa

SEQ ID NO: 50137 - RNA, 20 nt, Artificial Sequence
  Synthetic oligonucleotide: TRBC-187
ucuggaaagggaagagguaa

SEQ ID NO: 50138 - RNA, 20 nt, Artificial Sequence
  Synthetic oligonucleotide: TRBC-188
ccacagucugaaagaaaaca

SEQ ID NO: 50139 - RNA, 20 nt, Artificial Sequence
  Synthetic oligonucleotide: TRBC-189
ucccacccuccuccuuacca

SEQ ID NO: 50140 - RNA, 20 nt, Artificial Sequence
  Synthetic oligonucleotide: TRBC-190
ugcccucgugcugauggcca

SEQ ID NO: 50141 - RNA, 20 nt, Artificial Sequence
  Synthetic oligonucleotide: TRBC-191
cacagacccgcagccccuca

SEQ ID NO: 50142 - RNA, 20 nt, Artificial Sequence
  Synthetic oligonucleotide: TRBC-192
uggaagagagaacauuuuca

SEQ ID NO: 50143 - RNA, 20 nt, Artificial Sequence
  Synthetic oligonucleotide: TRBC-193
guugcggggguucugccaga

SEQ ID NO: 50144 - RNA, 20 nt, Artificial Sequence
  Synthetic oligonucleotide: TRBC-194
uagcaagaucucauagagga

SEQ ID NO: 50145 - RNA, 20 nt, Artificial Sequence
  Synthetic oligonucleotide: TRBC-195
gauggccaugguaaggagga

SEQ ID NO: 50146 - RNA, 20 nt, Artificial Sequence
  Synthetic oligonucleotide: TRBC-196
cuaugagaucuugcuaggga

SEQ ID NO: 50147 - RNA, 20 nt, Artificial Sequence
  Synthetic oligonucleotide: TRBC-197
gagcuggugggugaauggga

SEQ ID NO: 50148 - RNA, 20 nt, Artificial Sequence
  Synthetic oligonucleotide: TRBC-198
ggucagugcccucgugcuga

SEQ ID NO: 50149 - RNA, 20 nt, Artificial Sequence
  Synthetic oligonucleotide: TRBC-199
ugggagaucucugcuucuga

SEQ ID NO: 50150 - RNA, 20 nt, Artificial Sequence
  Synthetic oligonucleotide: TRBC-200
gcaguaucuggagucauuga

SEQ ID NO: 50151 - RNA, 20 nt, Artificial Sequence
  Synthetic oligonucleotide: TRBC-201
gagggcgggcugcuccuuga

SEQ ID NO: 50152 - RNA, 20 nt, Artificial Sequence
  Synthetic oligonucleotide: TRBC-202
guaaggaggagggugggaua

SEQ ID NO: 50153 - RNA, 20 nt, Artificial Sequence
  Synthetic oligonucleotide: TRBC-203
gggaagagguaauggggcua

SEQ ID NO: 50154 - RNA, 20 nt, Artificial Sequence
  Synthetic oligonucleotide: TRBC-204
uccucuaugagaucuugcua

SEQ ID NO: 50155 - RNA, 20 nt, Artificial Sequence
  Synthetic oligonucleotide: TRBC-205
gccacagucugaaagaaaac

SEQ ID NO: 50156 - RNA, 20 nt, Artificial Sequence
  Synthetic oligonucleotide: TRBC-206
ucuccgagagcccguagaac

SEQ ID NO: 50157 - RNA, 20 nt, Artificial Sequence
  Synthetic oligonucleotide: TRBC-207
ccacacccaaaaggccacac

SEQ ID NO: 50158 - RNA, 20 nt, Artificial Sequence
  Synthetic oligonucleotide: TRBC-208
gaaaauguucucucuuccac

SEQ ID NO: 50159 - RNA, 20 nt, Artificial Sequence
  Synthetic oligonucleotide: TRBC-209
cauagaggaugguggcagac

SEQ ID NO: 50160 - RNA, 20 nt, Artificial Sequence
  Synthetic oligonucleotide: TRBC-210
gcgcugacgaucugggugac

SEQ ID NO: 50161 - RNA, 20 nt, Artificial Sequence
  Synthetic oligonucleotide: TRBC-211
gcugucaaguccaguucuac

SEQ ID NO: 50162 - RNA, 20 nt, Artificial Sequence
  Synthetic oligonucleotide: TRBC-212
aaaaggagagacucacuuac

SEQ ID NO: 50163 - RNA, 20 nt, Artificial Sequence
  Synthetic oligonucleotide: TRBC-213
ggagaaugacgaguggaccc

SEQ ID NO: 50164 - RNA, 20 nt, Artificial Sequence
  Synthetic oligonucleotide: TRBC-214
ccacucaccugcucuacccc

SEQ ID NO: 50165 - RNA, 20 nt, Artificial Sequence
  Synthetic oligonucleotide: TRBC-215
gcuagcuccaaaaccauccc

SEQ ID NO: 50166 - RNA, 20 nt, Artificial Sequence
  Synthetic oligonucleotide: TRBC-216
agaucgucagcgccgaggcc

SEQ ID NO: 50167 - RNA, 20 nt, Artificial Sequence
  Synthetic oligonucleotide: TRBC-217
uagagcaggugaguggggcc

SEQ ID NO: 50168 - RNA, 20 nt, Artificial Sequence
  Synthetic oligonucleotide: TRBC-218
cgggguagaagccuguggcc

SEQ ID NO: 50169 - RNA, 20 nt, Artificial Sequence
  Synthetic oligonucleotide: TRBC-219
guggggccuggggagaugcc

SEQ ID NO: 50170 - RNA, 20 nt, Artificial Sequence
  Synthetic oligonucleotide: TRBC-220
aaaggccacacuggugugcc

SEQ ID NO: 50171 - RNA, 20 nt, Artificial Sequence
  Synthetic oligonucleotide: TRBC-221
ugacagguuuggcccuaucc

SEQ ID NO: 50172 - RNA, 20 nt, Artificial Sequence
  Synthetic oligonucleotide: TRBC-222
gccgaggccugggguagagc

SEQ ID NO: 50173 - RNA, 20 nt, Artificial Sequence
  Synthetic oligonucleotide: TRBC-223
ccgaccacguggagcugagc

SEQ ID NO: 50174 - RNA, 20 nt, Artificial Sequence
  Synthetic oligonucleotide: TRBC-224
uaucuggagucauugagggc

SEQ ID NO: 50175 - RNA, 20 nt, Artificial Sequence
  Synthetic oligonucleotide: TRBC-225
gcugcuccuugaggggcugc

SEQ ID NO: 50176 - RNA, 20 nt, Artificial Sequence
  Synthetic oligonucleotide: TRBC-226
uggcagacaggaccccuugc

SEQ ID NO: 50177 - RNA, 20 nt, Artificial Sequence
  Synthetic oligonucleotide: TRBC-227
aggccucggcgcugacgauc

SEQ ID NO: 50178 - RNA, 20 nt, Artificial Sequence
  Synthetic oligonucleotide: TRBC-228
gcggcugcucaggcaguauc

SEQ ID NO: 50179 - RNA, 20 nt, Artificial Sequence
  Synthetic oligonucleotide: TRBC-229
ucagacuguggcuucaccuc

SEQ ID NO: 50180 - RNA, 20 nt, Artificial Sequence
  Synthetic oligonucleotide: TRBC-230
ggcucaaacacagcgaccuc

SEQ ID NO: 50181 - RNA, 20 nt, Artificial Sequence
  Synthetic oligonucleotide: TRBC-231
agaagguggccgagacccuc

SEQ ID NO: 50182 - RNA, 20 nt, Artificial Sequence
  Synthetic oligonucleotide: TRBC-232
augguuuuggagcuagccuc

SEQ ID NO: 50183 - RNA, 20 nt, Artificial Sequence
  Synthetic oligonucleotide: TRBC-233
agacccucaggcggcugcuc

SEQ ID NO: 50184 - RNA, 20 nt, Artificial Sequence
  Synthetic oligonucleotide: TRBC-234
cagcucagcuccacgugguc

SEQ ID NO: 50185 - RNA, 20 nt, Artificial Sequence
  Synthetic oligonucleotide: TRBC-235
ugagggucucggccaccuuc

SEQ ID NO: 50186 - RNA, 20 nt, Artificial Sequence
  Synthetic oligonucleotide: TRBC-236
guggaagagagaacauuuuc

SEQ ID NO: 50187 - RNA, 20 nt, Artificial Sequence
  Synthetic oligonucleotide: TRBC-237
aacagagucuuaccagcaag

SEQ ID NO: 50188 - RNA, 20 nt, Artificial Sequence
  Synthetic oligonucleotide: TRBC-238
agguccucuggaaagggaag

SEQ ID NO: 50189 - RNA, 20 nt, Artificial Sequence
  Synthetic oligonucleotide: TRBC-239
cacagucugaaagaaaacag

SEQ ID NO: 50190 - RNA, 20 nt, Artificial Sequence
  Synthetic oligonucleotide: TRBC-240
aaugggaaggaggugcacag

SEQ ID NO: 50191 - RNA, 20 nt, Artificial Sequence
  Synthetic oligonucleotide: TRBC-241
gucaagagaaaggauuccag

SEQ ID NO: 50192 - RNA, 20 nt, Artificial Sequence
  Synthetic oligonucleotide: TRBC-242
auuaccucuucccuuuccag

SEQ ID NO: 50193 - RNA, 20 nt, Artificial Sequence
  Synthetic oligonucleotide: TRBC-243
ccugggguagagcaggugag

SEQ ID NO: 50194 - RNA, 20 nt, Artificial Sequence
  Synthetic oligonucleotide: TRBC-244
cccaccagcucagcuccacg

SEQ ID NO: 50195 - RNA, 20 nt, Artificial Sequence
  Synthetic oligonucleotide: TRBC-245
uuaccauggccaucagcacg

SEQ ID NO: 50196 - RNA, 20 nt, Artificial Sequence
  Synthetic oligonucleotide: TRBC-246
agcucagcuccacguggucg

SEQ ID NO: 50197 - RNA, 20 nt, Artificial Sequence
  Synthetic oligonucleotide: TRBC-247
cuggugggugaaugggaagg

SEQ ID NO: 50198 - RNA, 20 nt, Artificial Sequence
  Synthetic oligonucleotide: TRBC-248
ugcugauggccaugguaagg

SEQ ID NO: 50199 - RNA, 20 nt, Artificial Sequence
  Synthetic oligonucleotide: TRBC-249
agguggccgagacccucagg

SEQ ID NO: 50200 - RNA, 20 nt, Artificial Sequence
  Synthetic oligonucleotide: TRBC-250
ugauggccaugguaaggagg

SEQ ID NO: 50201 - RNA, 20 nt, Artificial Sequence
  Synthetic oligonucleotide: TRBC-251
aggagagacucacuuaccgg

SEQ ID NO: 50202 - RNA, 20 nt, Artificial Sequence
  Synthetic oligonucleotide: TRBC-252
ggccaugguaaggaggaggg

SEQ ID NO: 50203 - RNA, 20 nt, Artificial Sequence
  Synthetic oligonucleotide: TRBC-253
guaucuggagucauugaggg

SEQ ID NO: 50204 - RNA, 20 nt, Artificial Sequence
  Synthetic oligonucleotide: TRBC-254
caagaucucauagaggaugg

SEQ ID NO: 50205 - RNA, 20 nt, Artificial Sequence
  Synthetic oligonucleotide: TRBC-255
gggccuggggagaugccugg

SEQ ID NO: 50206 - RNA, 20 nt, Artificial Sequence
  Synthetic oligonucleotide: TRBC-256
accacguggagcugagcugg

SEQ ID NO: 50207 - RNA, 20 nt, Artificial Sequence
  Synthetic oligonucleotide: TRBC-257
uggaaagggaagagguaaug

SEQ ID NO: 50208 - RNA, 20 nt, Artificial Sequence
  Synthetic oligonucleotide: TRBC-258
cccuguuuucuuucagacug

SEQ ID NO: 50209 - RNA, 20 nt, Artificial Sequence
  Synthetic oligonucleotide: TRBC-259
gaauccuuucucuugaccug

SEQ ID NO: 50210 - RNA, 20 nt, Artificial Sequence
  Synthetic oligonucleotide: TRBC-260
acugccugagcagccgccug

SEQ ID NO: 50211 - RNA, 20 nt, Artificial Sequence
  Synthetic oligonucleotide: TRBC-261
gagcaggugaguggggccug

SEQ ID NO: 50212 - RNA, 20 nt, Artificial Sequence
  Synthetic oligonucleotide: TRBC-262
ggcugcuccuugaggggcug

SEQ ID NO: 50213 - RNA, 20 nt, Artificial Sequence
  Synthetic oligonucleotide: TRBC-263
ugggaaggaggugcacagug

SEQ ID NO: 50214 - RNA, 20 nt, Artificial Sequence
  Synthetic oligonucleotide: TRBC-264
uguggccaggcacaccagug

SEQ ID NO: 50215 - RNA, 20 nt, Artificial Sequence
  Synthetic oligonucleotide: TRBC-265
ugggguagagcaggugagug

SEQ ID NO: 50216 - RNA, 20 nt, Artificial Sequence
  Synthetic oligonucleotide: TRBC-266
ccaguguggccuuuugggug

SEQ ID NO: 50217 - RNA, 20 nt, Artificial Sequence
  Synthetic oligonucleotide: TRBC-267
ggcaguaucuggagucauug

SEQ ID NO: 50218 - RNA, 20 nt, Artificial Sequence
  Synthetic oligonucleotide: TRBC-268
ugagggcgggcugcuccuug

SEQ ID NO: 50219 - RNA, 20 nt, Artificial Sequence
  Synthetic oligonucleotide: TRBC-269
agcugagcuggugggugaau

SEQ ID NO: 50220 - RNA, 20 nt, Artificial Sequence
  Synthetic oligonucleotide: TRBC-270
cuggaaagggaagagguaau

SEQ ID NO: 50221 - RNA, 20 nt, Artificial Sequence
  Synthetic oligonucleotide: TRBC-271
gguaaggaggagggugggau

SEQ ID NO: 50222 - RNA, 20 nt, Artificial Sequence
  Synthetic oligonucleotide: TRBC-272
uggcucaaacacagcgaccu

SEQ ID NO: 50223 - RNA, 20 nt, Artificial Sequence
  Synthetic oligonucleotide: TRBC-273
accugcucuaccccaggccu

SEQ ID NO: 50224 - RNA, 20 nt, Artificial Sequence
  Synthetic oligonucleotide: TRBC-274
gaucgucagcgccgaggccu

SEQ ID NO: 50225 - RNA, 20 nt, Artificial Sequence
  Synthetic oligonucleotide: TRBC-275
agagcaggugaguggggccu

SEQ ID NO: 50226 - RNA, 20 nt, Artificial Sequence
  Synthetic oligonucleotide: TRBC-276
gacagguuuggcccuauccu

SEQ ID NO: 50227 - RNA, 20 nt, Artificial Sequence
  Synthetic oligonucleotide: TRBC-277
agggaagagguaauggggcu

SEQ ID NO: 50228 - RNA, 20 nt, Artificial Sequence
  Synthetic oligonucleotide: TRBC-278
auccucuaugagaucuugcu

SEQ ID NO: 50229 - RNA, 20 nt, Artificial Sequence
  Synthetic oligonucleotide: TRBC-279
gagcagccgccugagggucu

SEQ ID NO: 50230 - RNA, 20 nt, Artificial Sequence
  Synthetic oligonucleotide: TRBC-280
augggaaggaggugcacagu

SEQ ID NO: 50231 - RNA, 20 nt, Artificial Sequence
  Synthetic oligonucleotide: TRBC-281
cugggguagagcaggugagu

SEQ ID NO: 50232 - RNA, 20 nt, Artificial Sequence
  Synthetic oligonucleotide: TRBC-282
gccaugguaaggaggagggu

SEQ ID NO: 50233 - RNA, 20 nt, Artificial Sequence
  Synthetic oligonucleotide: TRBC-283
ccacguggagcugagcuggu

SEQ ID NO: 50234 - RNA, 20 nt, Artificial Sequence
  Synthetic oligonucleotide: TRBC-284
ccagcucagcuccacguggu

SEQ ID NO: 50235 - RNA, 20 nt, Artificial Sequence
  Synthetic oligonucleotide: TRBC-285
uugacaagaacagagcaugu

SEQ ID NO: 50236 - RNA, 20 nt, Artificial Sequence
  Synthetic oligonucleotide: TRBC-286
caguguggccuuuugggugu

SEQ ID NO: 50237 - RNA, 20 nt, Artificial Sequence
  Synthetic oligonucleotide: TRBC-287
gacgaucugggugacagguu

SEQ ID NO: 50238 - RNA, 20 nt, Artificial Sequence
  Synthetic oligonucleotide: TRBC-288
ggcacaccaguguggccuuu

SEQ ID NO: 50239 - RNA, 20 nt, Artificial Sequence
  Synthetic oligonucleotide: TRBC-289
agaaugaccugggaugguuu

SEQ ID NO: 50240 - RNA, 20 nt, Artificial Sequence
  Synthetic oligonucleotide: TRBC-290
gcacaccaguguggccuuuu

SEQ ID NO: 50241 - RNA, 21 nt, Artificial Sequence
  Synthetic oligonucleotide: TRBC-291
cuucccuagcaagaucucaua

SEQ ID NO: 50242 - RNA, 22 nt, Artificial Sequence
  Synthetic oligonucleotide: TRBC-292
ccuucccuagcaagaucucaua

SEQ ID NO: 50243 - RNA, 23 nt, Artificial Sequence
  Synthetic oligonucleotide: TRBC-293
gccuucccuagcaagaucucaua

SEQ ID NO: 50244 - RNA, 24 nt, Artificial Sequence
  Synthetic oligonucleotide: TRBC-294
ggccuucccuagcaagaucucaua

SEQ ID NO: 50245 - RNA, 18 nt, Artificial Sequence
  Synthetic oligonucleotide: TRBC-295
ggcucaaacacagcgacc

SEQ ID NO: 50246 - RNA, 19 nt, Artificial Sequence
  Synthetic oligonucleotide: TRBC-296
uggcucaaacacagcgacc

SEQ ID NO: 50247 - RNA, 20 nt, Artificial Sequence
  Synthetic oligonucleotide: TRBC-297
auggcucaaacacagcgacc

SEQ ID NO: 50248 - RNA, 21 nt, Artificial Sequence
  Synthetic oligonucleotide: TRBC-298
gauggcucaaacacagcgacc

SEQ ID NO: 50249 - RNA, 22 nt, Artificial Sequence
  Synthetic oligonucleotide: TRBC-299
ugauggcucaaacacagcgacc

SEQ ID NO: 50250 - RNA, 23 nt, Artificial Sequence
  Synthetic oligonucleotide: TRBC-300
cugauggcucaaacacagcgacc

SEQ ID NO: 50251 - RNA, 24 nt, Artificial Sequence
  Synthetic oligonucleotide: TRBC-301
ucugauggcucaaacacagcgacc

SEQ ID NO: 50252 - RNA, 18 nt, Artificial Sequence
  Synthetic oligonucleotide: TRBC-302
gacagcggaagugguugc

SEQ ID NO: 50253 - RNA, 19 nt, Artificial Sequence
  Synthetic oligonucleotide: TRBC-303
ugacagcggaagugguugc

SEQ ID NO: 50254 - RNA, 20 nt, Artificial Sequence
  Synthetic oligonucleotide: TRBC-30
uugacagcggaagugguugc

SEQ ID NO: 50255 - RNA, 21 nt, Artificial Sequence
  Synthetic oligonucleotide: TRBC-304
cuugacagcggaagugguugc

SEQ ID NO: 50256 - RNA, 22 nt, Artificial Sequence
  Synthetic oligonucleotide: TRBC-305
acuugacagcggaagugguugc

SEQ ID NO: 50257 - RNA, 23 nt, Artificial Sequence
  Synthetic oligonucleotide: TRBC-306
gacuugacagcggaagugguugc

SEQ ID NO: 50258 - RNA, 24 nt, Artificial Sequence
  Synthetic oligonucleotide: TRBC-307
ggacuugacagcggaagugguugc

SEQ ID NO: 50259 - RNA, 18 nt, Artificial Sequence
  Synthetic oligonucleotide: TRBC-308
gacagguuuggcccuauc

SEQ ID NO: 50260 - RNA, 19 nt, Artificial Sequence
  Synthetic oligonucleotide: TRBC-309
ugacagguuuggcccuauc

SEQ ID NO: 50261 - RNA, 20 nt, Artificial Sequence
  Synthetic oligonucleotide: TRBC-310
gugacagguuuggcccuauc

SEQ ID NO: 50262 - RNA, 18 nt, Artificial Sequence
  Synthetic oligonucleotide: TRBC-311
ggcugcucaggcaguauc

SEQ ID NO: 50263 - RNA, 19 nt, Artificial Sequence
  Synthetic oligonucleotide: TRBC-312
cggcugcucaggcaguauc

SEQ ID NO: 50264 - RNA, 20 nt, Artificial Sequence
  Synthetic oligonucleotide: TRBC-228
gcggcugcucaggcaguauc

SEQ ID NO: 50265 - RNA, 21 nt, Artificial Sequence
  Synthetic oligonucleotide: TRBC-313
ggcggcugcucaggcaguauc

SEQ ID NO: 50266 - RNA, 22 nt, Artificial Sequence
  Synthetic oligonucleotide: TRBC-314
aggcggcugcucaggcaguauc

SEQ ID NO: 50267 - RNA, 23 nt, Artificial Sequence
  Synthetic oligonucleotide: TRBC-315
caggcggcugcucaggcaguauc

SEQ ID NO: 50268 - RNA, 24 nt, Artificial Sequence
  Synthetic oligonucleotide: TRBC-316
ucaggcggcugcucaggcaguauc

SEQ ID NO: 50269 - RNA, 18 nt, Artificial Sequence
  Synthetic oligonucleotide: TRBC-317
gguuuuggagcuagccuc

SEQ ID NO: 50270 - RNA, 19 nt, Artificial Sequence
  Synthetic oligonucleotide: TRBC-318
ugguuuuggagcuagccuc

SEQ ID NO: 50271 - RNA, 20 nt, Artificial Sequence
  Synthetic oligonucleotide: TRBC-232
augguuuuggagcuagccuc

SEQ ID NO: 50272 - RNA, 21 nt, Artificial Sequence
  Synthetic oligonucleotide: TRBC-319
gaugguuuuggagcuagccuc

SEQ ID NO: 50273 - RNA, 22 nt, Artificial Sequence
  Synthetic oligonucleotide: TRBC-320
ggaugguuuuggagcuagccuc

SEQ ID NO: 50274 - RNA, 23 nt, Artificial Sequence
  Synthetic oligonucleotide: TRBC-321
gggaugguuuuggagcuagccuc

SEQ ID NO: 50275 - RNA, 24 nt, Artificial Sequence
  Synthetic oligonucleotide: TRBC-322
ugggaugguuuuggagcuagccuc

SEQ ID NO: 50276 - RNA, 18 nt, Artificial Sequence
  Synthetic oligonucleotide: TRBC-323
ggccucggcgcugacgau

SEQ ID NO: 50277 - RNA, 19 nt, Artificial Sequence
  Synthetic oligonucleotide: TRBC-324
aggccucggcgcugacgau

SEQ ID NO: 50278 - RNA, 20 nt, Artificial Sequence
  Synthetic oligonucleotide: TRBC-325
caggccucggcgcugacgau

SEQ ID NO: 50279 - RNA, 21 nt, Artificial Sequence
  Synthetic oligonucleotide: TRBC-326
ccaggccucggcgcugacgau

SEQ ID NO: 50280 - RNA, 22 nt, Artificial Sequence
  Synthetic oligonucleotide: TRBC-327
cccaggccucggcgcugacgau

SEQ ID NO: 50281 - RNA, 23 nt, Artificial Sequence
  Synthetic oligonucleotide: TRBC-328
ccccaggccucggcgcugacgau

SEQ ID NO: 50282 - RNA, 24 nt, Artificial Sequence
  Synthetic oligonucleotide: TRBC-329
accccaggccucggcgcugacgau

SEQ ID NO: 50283 - RNA, 21 nt, Artificial Sequence
  Synthetic oligonucleotide: TRBC-330
accagcucagcuccacguggu

SEQ ID NO: 50284 - RNA, 22 nt, Artificial Sequence
  Synthetic oligonucleotide: TRBC-331
caccagcucagcuccacguggu

SEQ ID NO: 50285 - RNA, 23 nt, Artificial Sequence
  Synthetic oligonucleotide: TRBC-332
ccaccagcucagcuccacguggu

SEQ ID NO: 50286 - RNA, 24 nt, Artificial Sequence
  Synthetic oligonucleotide: TRBC-333
cccaccagcucagcuccacguggu

SEQ ID NO: 50287 - RNA, 21 nt, Artificial Sequence
  Synthetic oligonucleotide: TRBC-334
caggcacaccaguguggccuu

SEQ ID NO: 50288 - RNA, 22 nt, Artificial Sequence
  Synthetic oligonucleotide: TRBC-335
ccaggcacaccaguguggccuu

SEQ ID NO: 50289 - RNA, 23 nt, Artificial Sequence
  Synthetic oligonucleotide: TRBC-336
gccaggcacaccaguguggccuu

SEQ ID NO: 50290 - RNA, 24 nt, Artificial Sequence
  Synthetic oligonucleotide: TRBC-337
ggccaggcacaccaguguggccuu

SEQ ID NO: 50291 - RNA, 21 nt, Artificial Sequence
  Synthetic oligonucleotide: TRBC-338
cuguggaagagagaacauuuu

SEQ ID NO: 50292 - RNA, 22 nt, Artificial Sequence
  Synthetic oligonucleotide: TRBC-339
ccuguggaagagagaacauuuu

SEQ ID NO: 50293 - RNA, 23 nt, Artificial Sequence
  Synthetic oligonucleotide: TRBC-340
accuguggaagagagaacauuuu

SEQ ID NO: 50294 - RNA, 24 nt, Artificial Sequence
  Synthetic oligonucleotide: TRBC-341
gaccuguggaagagagaacauuuu

SEQ ID NO: 50295 - RNA, 18 nt, Artificial Sequence
  Synthetic oligonucleotide: TRBC-342
augcucuguucuugucaa

SEQ ID NO: 50296 - RNA, 19 nt, Artificial Sequence
  Synthetic oligonucleotide: TRBC-343
caugcucuguucuugucaa

SEQ ID NO: 50297 - RNA, 20 nt, Artificial Sequence
  Synthetic oligonucleotide: TRBC-344
acaugcucuguucuugucaa

SEQ ID NO: 50298 - RNA, 21 nt, Artificial Sequence
  Synthetic oligonucleotide: TRBC-345
uacaugcucuguucuugucaa

SEQ ID NO: 50299 - RNA, 22 nt, Artificial Sequence
  Synthetic oligonucleotide: TRBC-346
cuacaugcucuguucuugucaa

SEQ ID NO: 50300 - RNA, 23 nt, Artificial Sequence
  Synthetic oligonucleotide: TRBC-347
ccuacaugcucuguucuugucaa

SEQ ID NO: 50301 - RNA, 24 nt, Artificial Sequence
  Synthetic oligonucleotide: TRBC-348
accuacaugcucuguucuugucaa

SEQ ID NO: 50302 - RNA, 18 nt, Artificial Sequence
  Synthetic oligonucleotide: TRBC-349
uggcuucaccuccgguaa

SEQ ID NO: 50303 - RNA, 19 nt, Artificial Sequence
  Synthetic oligonucleotide: TRBC-350
guggcuucaccuccgguaa

SEQ ID NO: 50304 - RNA, 20 nt, Artificial Sequence
  Synthetic oligonucleotide: TRBC-351
uguggcuucaccuccgguaa

SEQ ID NO: 50305 - RNA, 21 nt, Artificial Sequence
  Synthetic oligonucleotide: TRBC-352
cuguggcuucaccuccgguaa

SEQ ID NO: 50306 - RNA, 22 nt, Artificial Sequence
  Synthetic oligonucleotide: TRBC-353
acuguggcuucaccuccgguaa

SEQ ID NO: 50307 - RNA, 23 nt, Artificial Sequence
  Synthetic oligonucleotide: TRBC-354
gacuguggcuucaccuccgguaa

SEQ ID NO: 50308 - RNA, 24 nt, Artificial Sequence
  Synthetic oligonucleotide: TRBC-355
agacuguggcuucaccuccgguaa

SEQ ID NO: 50309 - RNA, 18 nt, Artificial Sequence
  Synthetic oligonucleotide: TRBC-356
aacagagucuuaccagca

SEQ ID NO: 50310 - RNA, 19 nt, Artificial Sequence
  Synthetic oligonucleotide: TRBC-357
caacagagucuuaccagca

SEQ ID NO: 50311 - RNA, 20 nt, Artificial Sequence
  Synthetic oligonucleotide: TRBC-22
ucaacagagucuuaccagca

SEQ ID NO: 50312 - RNA, 21 nt, Artificial Sequence
  Synthetic oligonucleotide: TRBC-358
ucucuuccacaggucaagaga

SEQ ID NO: 50313 - RNA, 22 nt, Artificial Sequence
  Synthetic oligonucleotide: TRBC-359
cucucuuccacaggucaagaga

SEQ ID NO: 50314 - RNA, 23 nt, Artificial Sequence
  Synthetic oligonucleotide: TRBC-360
ucucucuuccacaggucaagaga

SEQ ID NO: 50315 - RNA, 24 nt, Artificial Sequence
  Synthetic oligonucleotide: TRBC-361
uucucucuuccacaggucaagaga

SEQ ID NO: 50316 - RNA, 18 nt, Artificial Sequence
  Synthetic oligonucleotide: TRBC-362
gagaaugacgaguggacc

SEQ ID NO: 50317 - RNA, 19 nt, Artificial Sequence
  Synthetic oligonucleotide: TRBC-363
ggagaaugacgaguggacc

SEQ ID NO: 50318 - RNA, 20 nt, Artificial Sequence
  Synthetic oligonucleotide: TRBC-364
cggagaaugacgaguggacc

SEQ ID NO: 50319 - RNA, 21 nt, Artificial Sequence
  Synthetic oligonucleotide: TRBC-365
ucggagaaugacgaguggacc

SEQ ID NO: 50320 - RNA, 22 nt, Artificial Sequence
  Synthetic oligonucleotide: TRBC-366
cucggagaaugacgaguggacc

SEQ ID NO: 50321 - RNA, 23 nt, Artificial Sequence
  Synthetic oligonucleotide: TRBC-367
ucucggagaaugacgaguggacc

SEQ ID NO: 50322 - RNA, 24 nt, Artificial Sequence
  Synthetic oligonucleotide: TRBC-368
cucucggagaaugacgaguggacc

SEQ ID NO: 50323 - RNA, 18 nt, Artificial Sequence
  Synthetic oligonucleotide: TRBC-369
aucgucagcgccgaggcc

SEQ ID NO: 50324 - RNA, 19 nt, Artificial Sequence
  Synthetic oligonucleotide: TRBC-370
gaucgucagcgccgaggcc

SEQ ID NO: 50325 - RNA, 20 nt, Artificial Sequence
  Synthetic oligonucleotide: TRBC-216
agaucgucagcgccgaggcc

SEQ ID NO: 50326 - RNA, 21 nt, Artificial Sequence
  Synthetic oligonucleotide: TRBC-371
cagaucgucagcgccgaggcc

SEQ ID NO: 50327 - RNA, 22 nt, Artificial Sequence
  Synthetic oligonucleotide: TRBC-372
ccagaucgucagcgccgaggcc

SEQ ID NO: 50328 - RNA, 23 nt, Artificial Sequence
  Synthetic oligonucleotide: TRBC-373
cccagaucgucagcgccgaggcc

SEQ ID NO: 50329 - RNA, 24 nt, Artificial Sequence
  Synthetic oligonucleotide: TRBC-374
acccagaucgucagcgccgaggcc

SEQ ID NO: 50330 - RNA, 21 nt, Artificial Sequence
  Synthetic oligonucleotide: TRBC-375
ccgaggccugggguagagcag

SEQ ID NO: 50331 - RNA, 22 nt, Artificial Sequence
  Synthetic oligonucleotide: TRBC-376
gccgaggccugggguagagcag

SEQ ID NO: 50332 - RNA, 23 nt, Artificial Sequence
  Synthetic oligonucleotide: TRBC-377
cgccgaggccugggguagagcag

SEQ ID NO: 50333 - RNA, 24 nt, Artificial Sequence
  Synthetic oligonucleotide: TRBC-378
gcgccgaggccugggguagagcag

SEQ ID NO: 50334 - RNA, 18 nt, Artificial Sequence
  Synthetic oligonucleotide: TRBC-379
caguucuacgggcucucg

SEQ ID NO: 50335 - RNA, 19 nt, Artificial Sequence
  Synthetic oligonucleotide: TRBC-380
ccaguucuacgggcucucg

SEQ ID NO: 50336 - RNA, 20 nt, Artificial Sequence
  Synthetic oligonucleotide: TRBC-381
uccaguucuacgggcucucg

SEQ ID NO: 50337 - RNA, 21 nt, Artificial Sequence
  Synthetic oligonucleotide: TRBC-382
guccaguucuacgggcucucg

SEQ ID NO: 50338 - RNA, 22 nt, Artificial Sequence
  Synthetic oligonucleotide: TRBC-383
aguccaguucuacgggcucucg

SEQ ID NO: 50339 - RNA, 23 nt, Artificial Sequence
  Synthetic oligonucleotide: TRBC-384
aaguccaguucuacgggcucucg

SEQ ID NO: 50340 - RNA, 24 nt, Artificial Sequence
  Synthetic oligonucleotide: TRBC-385
caaguccaguucuacgggcucucg

SEQ ID NO: 50341 - RNA, 18 nt, Artificial Sequence
  Synthetic oligonucleotide: TRBC-386
acgggcucucggagaaug

SEQ ID NO: 50342 - RNA, 19 nt, Artificial Sequence
  Synthetic oligonucleotide: TRBC-387
uacgggcucucggagaaug

SEQ ID NO: 50343 - RNA, 20 nt, Artificial Sequence
  Synthetic oligonucleotide: TRBC-388
cuacgggcucucggagaaug

SEQ ID NO: 50344 - RNA, 21 nt, Artificial Sequence
  Synthetic oligonucleotide: TRBC-389
ucuacgggcucucggagaaug

SEQ ID NO: 50345 - RNA, 22 nt, Artificial Sequence
  Synthetic oligonucleotide: TRBC-390
uucuacgggcucucggagaaug

SEQ ID NO: 50346 - RNA, 23 nt, Artificial Sequence
  Synthetic oligonucleotide: TRBC-391
guucuacgggcucucggagaaug

SEQ ID NO: 50347 - RNA, 24 nt, Artificial Sequence
  Synthetic oligonucleotide: TRBC-392
aguucuacgggcucucggagaaug

SEQ ID NO: 50348 - RNA, 21 nt, Artificial Sequence
  Synthetic oligonucleotide: TRBC-393
cgaccacguggagcugagcug

SEQ ID NO: 50349 - RNA, 22 nt, Artificial Sequence
  Synthetic oligonucleotide: TRBC-394
ccgaccacguggagcugagcug

SEQ ID NO: 50350 - RNA, 23 nt, Artificial Sequence
  Synthetic oligonucleotide: TRBC-395
cccgaccacguggagcugagcug

SEQ ID NO: 50351 - RNA, 24 nt, Artificial Sequence
  Synthetic oligonucleotide: TRBC-396
ccccgaccacguggagcugagcug

SEQ ID NO: 50352 - RNA, 18 nt, Artificial Sequence
  Synthetic oligonucleotide: TRBC-397
cugccugagcagccgccu

SEQ ID NO: 50353 - RNA, 19 nt, Artificial Sequence
  Synthetic oligonucleotide: TRBC-398
acugccugagcagccgccu

SEQ ID NO: 50354 - RNA, 20 nt, Artificial Sequence
  Synthetic oligonucleotide: TRBC-399
uacugccugagcagccgccu

SEQ ID NO: 50355 - RNA, 21 nt, Artificial Sequence
  Synthetic oligonucleotide: TRBC-400
auacugccugagcagccgccu

SEQ ID NO: 50356 - RNA, 22 nt, Artificial Sequence
  Synthetic oligonucleotide: TRBC-401
gauacugccugagcagccgccu

SEQ ID NO: 50357 - RNA, 23 nt, Artificial Sequence
  Synthetic oligonucleotide: TRBC-402
agauacugccugagcagccgccu

SEQ ID NO: 50358 - RNA, 24 nt, Artificial Sequence
  Synthetic oligonucleotide: TRBC-403
cagauacugccugagcagccgccu

SEQ ID NO: 50359 - RNA, 18 nt, Artificial Sequence
  Synthetic oligonucleotide: TRBC-404
gaaaacaggggaagaaaa

SEQ ID NO: 50360 - RNA, 19 nt, Artificial Sequence
  Synthetic oligonucleotide: TRBC-405
agaaaacaggggaagaaaa

SEQ ID NO: 50361 - RNA, 20 nt, Artificial Sequence
  Synthetic oligonucleotide: TRBC-406
aagaaaacaggggaagaaaa

SEQ ID NO: 50362 - RNA, 21 nt, Artificial Sequence
  Synthetic oligonucleotide: TRBC-407
aaagaaaacaggggaagaaaa

SEQ ID NO: 50363 - RNA, 22 nt, Artificial Sequence
  Synthetic oligonucleotide: TRBC-408
gaaagaaaacaggggaagaaaa

SEQ ID NO: 50364 - RNA, 23 nt, Artificial Sequence
  Synthetic oligonucleotide: TRBC-409
ugaaagaaaacaggggaagaaaa

SEQ ID NO: 50365 - RNA, 24 nt, Artificial Sequence
  Synthetic oligonucleotide: TRBC-410
cugaaagaaaacaggggaagaaaa

SEQ ID NO: 50366 - RNA, 18 nt, Artificial Sequence
  Synthetic oligonucleotide: TRBC-411
cccuagcaagaucucaua

SEQ ID NO: 50367 - RNA, 19 nt, Artificial Sequence
  Synthetic oligonucleotide: TRBC-412
ucccuagcaagaucucaua

SEQ ID NO: 50368 - RNA, 20 nt, Artificial Sequence
  Synthetic oligonucleotide: TRBC-413
uucccuagcaagaucucaua

SEQ ID NO: 50369 - RNA, 21 nt, Artificial Sequence
  Synthetic oligonucleotide: TRBC-414
ggugacagguuuggcccuauc

SEQ ID NO: 50370 - RNA, 22 nt, Artificial Sequence
  Synthetic oligonucleotide: TRBC-415
gggugacagguuuggcccuauc

SEQ ID NO: 50371 - RNA, 23 nt, Artificial Sequence
  Synthetic oligonucleotide: TRBC-416
ugggugacagguuuggcccuauc

SEQ ID NO: 50372 - RNA, 24 nt, Artificial Sequence
  Synthetic oligonucleotide: TRBC-417
cugggugacagguuuggcccuauc

SEQ ID NO: 50373 - RNA, 18 nt, Artificial Sequence
  Synthetic oligonucleotide: TRBC-418
gcugcuccuugaggggcu

SEQ ID NO: 50374 - RNA, 19 nt, Artificial Sequence
  Synthetic oligonucleotide: TRBC-419
ggcugcuccuugaggggcu

SEQ ID NO: 50375 - RNA, 20 nt, Artificial Sequence
  Synthetic oligonucleotide: TRBC-420
gggcugcuccuugaggggcu

SEQ ID NO: 50376 - RNA, 21 nt, Artificial Sequence
  Synthetic oligonucleotide: TRBC-421
cgggcugcuccuugaggggcu

SEQ ID NO: 50377 - RNA, 22 nt, Artificial Sequence
  Synthetic oligonucleotide: TRBC-422
gcgggcugcuccuugaggggcu

SEQ ID NO: 50378 - RNA, 23 nt, Artificial Sequence
  Synthetic oligonucleotide: TRBC-423
ggcgggcugcuccuugaggggcu

SEQ ID NO: 50379 - RNA, 24 nt, Artificial Sequence
  Synthetic oligonucleotide: TRBC-424
gggcgggcugcuccuugaggggcu

SEQ ID NO: 50380 - RNA, 18 nt, Artificial Sequence
  Synthetic oligonucleotide: TRBC-425
agcucagcuccacguggu

SEQ ID NO: 50381 - RNA, 19 nt, Artificial Sequence
  Synthetic oligonucleotide: TRBC-426
cagcucagcuccacguggu

SEQ ID NO: 50382 - RNA, 20 nt, Artificial Sequence
  Synthetic oligonucleotide: TRBC-284
ccagcucagcuccacguggu

SEQ ID NO: 50383 - RNA, 18 nt, Artificial Sequence
  Synthetic oligonucleotide: TRBC-427
gcacaccaguguggccuu

SEQ ID NO: 50384 - RNA, 19 nt, Artificial Sequence
  Synthetic oligonucleotide: TRBC-428
ggcacaccaguguggccuu

SEQ ID NO: 50385 - RNA, 20 nt, Artificial Sequence
  Synthetic oligonucleotide: TRBC-429
aggcacaccaguguggccuu

SEQ ID NO: 50386 - RNA, 18 nt, Artificial Sequence
  Synthetic oligonucleotide: TRBC-430
uggaagagagaacauuuu

SEQ ID NO: 50387 - RNA, 19 nt, Artificial Sequence
  Synthetic oligonucleotide: TRBC-431
guggaagagagaacauuuu

SEQ ID NO: 50388 - RNA, 20 nt, Artificial Sequence
  Synthetic oligonucleotide: TRBC-432
uguggaagagagaacauuuu

SEQ ID NO: 50389 - RNA, 21 nt, Artificial Sequence
  Synthetic oligonucleotide: TRBC-433
gucaacagagucuuaccagca

SEQ ID NO: 50390 - RNA, 22 nt, Artificial Sequence
  Synthetic oligonucleotide: TRBC-434
ugucaacagagucuuaccagca

SEQ ID NO: 50391 - RNA, 23 nt, Artificial Sequence
  Synthetic oligonucleotide: TRBC-435
uugucaacagagucuuaccagca

SEQ ID NO: 50392 - RNA, 24 nt, Artificial Sequence
  Synthetic oligonucleotide: TRBC-436
cuugucaacagagucuuaccagca

SEQ ID NO: 50393 - RNA, 18 nt, Artificial Sequence
  Synthetic oligonucleotide: TRBC-437
cuuccacaggucaagaga

SEQ ID NO: 50394 - RNA, 19 nt, Artificial Sequence
  Synthetic oligonucleotide: TRBC-438
ucuuccacaggucaagaga

SEQ ID NO: 50395 - RNA, 20 nt, Artificial Sequence
  Synthetic oligonucleotide: TRBC-439
cucuuccacaggucaagaga

SEQ ID NO: 50396 - RNA, 18 nt, Artificial Sequence
  Synthetic oligonucleotide: TRBC-440
ugggaaggaggugcacag

SEQ ID NO: 50397 - RNA, 19 nt, Artificial Sequence
  Synthetic oligonucleotide: TRBC-441
augggaaggaggugcacag

SEQ ID NO: 50398 - RNA, 20 nt, Artificial Sequence
  Synthetic oligonucleotide: TRBC-240
aaugggaaggaggugcacag

SEQ ID NO: 50399 - RNA, 21 nt, Artificial Sequence
  Synthetic oligonucleotide: TRBC-442
gaaugggaaggaggugcacag

SEQ ID NO: 50400 - RNA, 22 nt, Artificial Sequence
  Synthetic oligonucleotide: TRBC-443
ugaaugggaaggaggugcacag

SEQ ID NO: 50401 - RNA, 23 nt, Artificial Sequence
  Synthetic oligonucleotide: TRBC-444
gugaaugggaaggaggugcacag

SEQ ID NO: 50402 - RNA, 24 nt, Artificial Sequence
  Synthetic oligonucleotide: TRBC-445
ggugaaugggaaggaggugcacag

SEQ ID NO: 50403 - RNA, 18 nt, Artificial Sequence
  Synthetic oligonucleotide: TRBC-446
aggccugggguagagcag

SEQ ID NO: 50404 - RNA, 19 nt, Artificial Sequence
  Synthetic oligonucleotide: TRBC-447
gaggccugggguagagcag

SEQ ID NO: 50405 - RNA, 20 nt, Artificial Sequence
  Synthetic oligonucleotide: TRBC-448
cgaggccugggguagagcag

SEQ ID NO: 50406 - RNA, 18 nt, Artificial Sequence
  Synthetic oligonucleotide: TRBC-449
gauggccaugguaaggag

SEQ ID NO: 50407 - RNA, 19 nt, Artificial Sequence
  Synthetic oligonucleotide: TRBC-450
ugauggccaugguaaggag

SEQ ID NO: 50408 - RNA, 20 nt, Artificial Sequence
  Synthetic oligonucleotide: TRBC-451
cugauggccaugguaaggag

SEQ ID NO: 50409 - RNA, 21 nt, Artificial Sequence
  Synthetic oligonucleotide: TRBC-452
gcugauggccaugguaaggag

SEQ ID NO: 50410 - RNA, 22 nt, Artificial Sequence
  Synthetic oligonucleotide: TRBC-453
ugcugauggccaugguaaggag

SEQ ID NO: 50411 - RNA, 23 nt, Artificial Sequence
  Synthetic oligonucleotide: TRBC-454
gugcugauggccaugguaaggag

SEQ ID NO: 50412 - RNA, 24 nt, Artificial Sequence
  Synthetic oligonucleotide: TRBC-455
cgugcugauggccaugguaaggag

SEQ ID NO: 50413 - RNA, 18 nt, Artificial Sequence
  Synthetic oligonucleotide: TRBC-456
ccaugguaaggaggaggg

SEQ ID NO: 50414 - RNA, 19 nt, Artificial Sequence
  Synthetic oligonucleotide: TRBC-457
gccaugguaaggaggaggg

SEQ ID NO: 50415 - RNA, 20 nt, Artificial Sequence
  Synthetic oligonucleotide: TRBC-252
ggccaugguaaggaggaggg

SEQ ID NO: 50416 - RNA, 21 nt, Artificial Sequence
  Synthetic oligonucleotide: TRBC-458
uggccaugguaaggaggaggg

SEQ ID NO: 50417 - RNA, 22 nt, Artificial Sequence
  Synthetic oligonucleotide: TRBC-459
auggccaugguaaggaggaggg

SEQ ID NO: 50418 - RNA, 23 nt, Artificial Sequence
  Synthetic oligonucleotide: TRBC-460
gauggccaugguaaggaggaggg

SEQ ID NO: 50419 - RNA, 24 nt, Artificial Sequence
  Synthetic oligonucleotide: TRBC-461
ugauggccaugguaaggaggaggg

SEQ ID NO: 50420 - RNA, 18 nt, Artificial Sequence
  Synthetic oligonucleotide: TRBC-462
guggagcugagcuggugg

SEQ ID NO: 50421 - RNA, 19 nt, Artificial Sequence
  Synthetic oligonucleotide: TRBC-463
cguggagcugagcuggugg

SEQ ID NO: 50422 - RNA, 20 nt, Artificial Sequence
  Synthetic oligonucleotide: TRBC-464
acguggagcugagcuggugg

SEQ ID NO: 50423 - RNA, 21 nt, Artificial Sequence
  Synthetic oligonucleotide: TRBC-465
cacguggagcugagcuggugg

SEQ ID NO: 50424 - RNA, 22 nt, Artificial Sequence
  Synthetic oligonucleotide: TRBC-466
ccacguggagcugagcuggugg

SEQ ID NO: 50425 - RNA, 23 nt, Artificial Sequence
  Synthetic oligonucleotide: TRBC-467
accacguggagcugagcuggugg

SEQ ID NO: 50426 - RNA, 24 nt, Artificial Sequence
  Synthetic oligonucleotide: TRBC-468
gaccacguggagcugagcuggugg

SEQ ID NO: 50427 - RNA, 18 nt, Artificial Sequence
  Synthetic oligonucleotide: TRBC-469
ccacguggagcugagcug

SEQ ID NO: 50428 - RNA, 19 nt, Artificial Sequence
  Synthetic oligonucleotide: TRBC-470
accacguggagcugagcug

SEQ ID NO: 50429 - RNA, 20 nt, Artificial Sequence
  Synthetic oligonucleotide: TRBC-471
gaccacguggagcugagcug

SEQ ID NO: 50430 - RNA, 18 nt, Artificial Sequence
  Synthetic oligonucleotide: TRBC-472
ccacagucugaaagaaaa

SEQ ID NO: 50431 - RNA, 19 nt, Artificial Sequence
  Synthetic oligonucleotide: TRBC-473
gccacagucugaaagaaaa

SEQ ID NO: 50432 - RNA, 20 nt, Artificial Sequence
  Synthetic oligonucleotide: TRBC-474
agccacagucugaaagaaaa

SEQ ID NO: 50433 - RNA, 21 nt, Artificial Sequence
  Synthetic oligonucleotide: TRBC-475
aagccacagucugaaagaaaa

SEQ ID NO: 50434 - RNA, 22 nt, Artificial Sequence
  Synthetic oligonucleotide: TRBC-476
gaagccacagucugaaagaaaa

SEQ ID NO: 50435 - RNA, 23 nt, Artificial Sequence
  Synthetic oligonucleotide: TRBC-477
ugaagccacagucugaaagaaaa

SEQ ID NO: 50436 - RNA, 24 nt, Artificial Sequence
  Synthetic oligonucleotide: TRBC-478
gugaagccacagucugaaagaaaa

SEQ ID NO: 50437 - RNA, 18 nt, Artificial Sequence
  Synthetic oligonucleotide: TRBC-479
uuucagguccucuggaaa

SEQ ID NO: 50438 - RNA, 19 nt, Artificial Sequence
  Synthetic oligonucleotide: TRBC-480
uuuucagguccucuggaaa

SEQ ID NO: 50439 - RNA, 20 nt, Artificial Sequence
  Synthetic oligonucleotide: TRBC-182
uuuuucagguccucuggaaa

SEQ ID NO: 50440 - RNA, 21 nt, Artificial Sequence
  Synthetic oligonucleotide: TRBC-481
guuuuucagguccucuggaaa

SEQ ID NO: 50441 - RNA, 22 nt, Artificial Sequence
  Synthetic oligonucleotide: TRBC-482
cguuuuucagguccucuggaaa

SEQ ID NO: 50442 - RNA, 23 nt, Artificial Sequence
  Synthetic oligonucleotide: TRBC-483
acguuuuucagguccucuggaaa

SEQ ID NO: 50443 - RNA, 24 nt, Artificial Sequence
  Synthetic oligonucleotide: TRBC-484
cacguuuuucagguccucuggaaa

SEQ ID NO: 50444 - RNA, 18 nt, Artificial Sequence
  Synthetic oligonucleotide: TRBC-485
agacucuguugacaagaa

SEQ ID NO: 50445 - RNA, 19 nt, Artificial Sequence
  Synthetic oligonucleotide: TRBC-486
aagacucuguugacaagaa

SEQ ID NO: 50446 - RNA, 20 nt, Artificial Sequence
  Synthetic oligonucleotide: TRBC-487
uaagacucuguugacaagaa

SEQ ID NO: 50447 - RNA, 21 nt, Artificial Sequence
  Synthetic oligonucleotide: TRBC-488
guaagacucuguugacaagaa

SEQ ID NO: 50448 - RNA, 22 nt, Artificial Sequence
  Synthetic oligonucleotide: TRBC-489
gguaagacucuguugacaagaa

SEQ ID NO: 50449 - RNA, 23 nt, Artificial Sequence
  Synthetic oligonucleotide: TRBC-490
ugguaagacucuguugacaagaa

SEQ ID NO: 50450 - RNA, 24 nt, Artificial Sequence
  Synthetic oligonucleotide: TRBC-491
cugguaagacucuguugacaagaa

SEQ ID NO: 50451 - RNA, 18 nt, Artificial Sequence
  Synthetic oligonucleotide: TRBC-492
cuccgagagcccguagaa

SEQ ID NO: 50452 - RNA, 19 nt, Artificial Sequence
  Synthetic oligonucleotide: TRBC-493
ucuccgagagcccguagaa

SEQ ID NO: 50453 - RNA, 20 nt, Artificial Sequence
  Synthetic oligonucleotide: TRBC-494
uucuccgagagcccguagaa

SEQ ID NO: 50454 - RNA, 21 nt, Artificial Sequence
  Synthetic oligonucleotide: TRBC-495
auucuccgagagcccguagaa

SEQ ID NO: 50455 - RNA, 22 nt, Artificial Sequence
  Synthetic oligonucleotide: TRBC-496
cauucuccgagagcccguagaa

SEQ ID NO: 50456 - RNA, 23 nt, Artificial Sequence
  Synthetic oligonucleotide: TRBC-497
ucauucuccgagagcccguagaa

SEQ ID NO: 50457 - RNA, 24 nt, Artificial Sequence
  Synthetic oligonucleotide: TRBC-498
gucauucuccgagagcccguagaa

SEQ ID NO: 50458 - RNA, 18 nt, Artificial Sequence
  Synthetic oligonucleotide: TRBC-499
uuuucagguccucuggaa

SEQ ID NO: 50459 - RNA, 19 nt, Artificial Sequence
  Synthetic oligonucleotide: TRBC-500
uuuuucagguccucuggaa

SEQ ID NO: 50460 - RNA, 20 nt, Artificial Sequence
  Synthetic oligonucleotide: TRBC-185
guuuuucagguccucuggaa

SEQ ID NO: 50461 - RNA, 21 nt, Artificial Sequence
  Synthetic oligonucleotide: TRBC-501
cguuuuucagguccucuggaa

SEQ ID NO: 50462 - RNA, 22 nt, Artificial Sequence
  Synthetic oligonucleotide: TRBC-502
acguuuuucagguccucuggaa

SEQ ID NO: 50463 - RNA, 23 nt, Artificial Sequence
  Synthetic oligonucleotide: TRBC-503
cacguuuuucagguccucuggaa

SEQ ID NO: 50464 - RNA, 24 nt, Artificial Sequence
  Synthetic oligonucleotide: TRBC-504
acacguuuuucagguccucuggaa

SEQ ID NO: 50465 - RNA, 18 nt, Artificial Sequence
  Synthetic oligonucleotide: TRBC-505
uucucuugaccuguggaa

SEQ ID NO: 50466 - RNA, 19 nt, Artificial Sequence
  Synthetic oligonucleotide: TRBC-506
uuucucuugaccuguggaa

SEQ ID NO: 50467 - RNA, 20 nt, Artificial Sequence
  Synthetic oligonucleotide: TRBC-507
cuuucucuugaccuguggaa

SEQ ID NO: 50468 - RNA, 21 nt, Artificial Sequence
  Synthetic oligonucleotide: TRBC-508
ccuuucucuugaccuguggaa

SEQ ID NO: 50469 - RNA, 22 nt, Artificial Sequence
  Synthetic oligonucleotide: TRBC-509
uccuuucucuugaccuguggaa

SEQ ID NO: 50470 - RNA, 23 nt, Artificial Sequence
  Synthetic oligonucleotide: TRBC-510
auccuuucucuugaccuguggaa

SEQ ID NO: 50471 - RNA, 24 nt, Artificial Sequence
  Synthetic oligonucleotide: TRBC-511
aauccuuucucuugaccuguggaa

SEQ ID NO: 50472 - RNA, 18 nt, Artificial Sequence
  Synthetic oligonucleotide: TRBC-512
uggaaagggaagagguaa

SEQ ID NO: 50473 - RNA, 19 nt, Artificial Sequence
  Synthetic oligonucleotide: TRBC-513
cuggaaagggaagagguaa

SEQ ID NO: 50474 - RNA, 20 nt, Artificial Sequence
  Synthetic oligonucleotide: TRBC-187
ucuggaaagggaagagguaa

SEQ ID NO: 50475 - RNA, 21 nt, Artificial Sequence
  Synthetic oligonucleotide: TRBC-514
cucuggaaagggaagagguaa

SEQ ID NO: 50476 - RNA, 22 nt, Artificial Sequence
  Synthetic oligonucleotide: TRBC-515
ccucuggaaagggaagagguaa

SEQ ID NO: 50477 - RNA, 23 nt, Artificial Sequence
  Synthetic oligonucleotide: TRBC-516
uccucuggaaagggaagagguaa

SEQ ID NO: 50478 - RNA, 24 nt, Artificial Sequence
  Synthetic oligonucleotide: TRBC-517
guccucuggaaagggaagagguaa

SEQ ID NO: 50479 - RNA, 18 nt, Artificial Sequence
  Synthetic oligonucleotide: TRBC-518
acagucugaaagaaaaca

SEQ ID NO: 50480 - RNA, 19 nt, Artificial Sequence
  Synthetic oligonucleotide: TRBC-519
cacagucugaaagaaaaca

SEQ ID NO: 50481 - RNA, 20 nt, Artificial Sequence
  Synthetic oligonucleotide: TRBC-188
ccacagucugaaagaaaaca

SEQ ID NO: 50482 - RNA, 21 nt, Artificial Sequence
  Synthetic oligonucleotide: TRBC-520
gccacagucugaaagaaaaca

SEQ ID NO: 50483 - RNA, 22 nt, Artificial Sequence
  Synthetic oligonucleotide: TRBC-521
agccacagucugaaagaaaaca

SEQ ID NO: 50484 - RNA, 23 nt, Artificial Sequence
  Synthetic oligonucleotide: TRBC-522
aagccacagucugaaagaaaaca

SEQ ID NO: 50485 - RNA, 24 nt, Artificial Sequence
  Synthetic oligonucleotide: TRBC-523
gaagccacagucugaaagaaaaca

SEQ ID NO: 50486 - RNA, 18 nt, Artificial Sequence
  Synthetic oligonucleotide: TRBC-524
guagaacuggacuugaca

SEQ ID NO: 50487 - RNA, 19 nt, Artificial Sequence
  Synthetic oligonucleotide: TRBC-525
cguagaacuggacuugaca

SEQ ID NO: 50488 - RNA, 20 nt, Artificial Sequence
  Synthetic oligonucleotide: TRBC-526
ccguagaacuggacuugaca

SEQ ID NO: 50489 - RNA, 21 nt, Artificial Sequence
  Synthetic oligonucleotide: TRBC-527
cccguagaacuggacuugaca

SEQ ID NO: 50490 - RNA, 22 nt, Artificial Sequence
  Synthetic oligonucleotide: TRBC-528
gcccguagaacuggacuugaca

SEQ ID NO: 50491 - RNA, 23 nt, Artificial Sequence
  Synthetic oligonucleotide: TRBC-529
agcccguagaacuggacuugaca

SEQ ID NO: 50492 - RNA, 24 nt, Artificial Sequence
  Synthetic oligonucleotide: TRBC-530
gagcccguagaacuggacuugaca

SEQ ID NO: 50493 - RNA, 18 nt, Artificial Sequence
  Synthetic oligonucleotide: TRBC-531
uucccuagcaagaucuca

SEQ ID NO: 50494 - RNA, 19 nt, Artificial Sequence
  Synthetic oligonucleotide: TRBC-532
cuucccuagcaagaucuca

SEQ ID NO: 50495 - RNA, 20 nt, Artificial Sequence
  Synthetic oligonucleotide: TRBC-533
ccuucccuagcaagaucuca

SEQ ID NO: 50496 - RNA, 21 nt, Artificial Sequence
  Synthetic oligonucleotide: TRBC-534
gccuucccuagcaagaucuca

SEQ ID NO: 50497 - RNA, 22 nt, Artificial Sequence
  Synthetic oligonucleotide: TRBC-535
ggccuucccuagcaagaucuca

SEQ ID NO: 50498 - RNA, 23 nt, Artificial Sequence
  Synthetic oligonucleotide: TRBC-536
uggccuucccuagcaagaucuca

SEQ ID NO: 50499 - RNA, 24 nt, Artificial Sequence
  Synthetic oligonucleotide: TRBC-537
guggccuucccuagcaagaucuca

SEQ ID NO: 50500 - RNA, 18 nt, Artificial Sequence
  Synthetic oligonucleotide: TRBC-538
aggcaguaucuggaguca

SEQ ID NO: 50501 - RNA, 19 nt, Artificial Sequence
  Synthetic oligonucleotide: TRBC-539
caggcaguaucuggaguca

SEQ ID NO: 50502 - RNA, 20 nt, Artificial Sequence
  Synthetic oligonucleotide: TRBC-540
ucaggcaguaucuggaguca

SEQ ID NO: 50503 - RNA, 21 nt, Artificial Sequence
  Synthetic oligonucleotide: TRBC-541
cucaggcaguaucuggaguca

SEQ ID NO: 50504 - RNA, 22 nt, Artificial Sequence
  Synthetic oligonucleotide: TRBC-542
gcucaggcaguaucuggaguca

SEQ ID NO: 50505 - RNA, 23 nt, Artificial Sequence
  Synthetic oligonucleotide: TRBC-543
ugcucaggcaguaucuggaguca

SEQ ID NO: 50506 - RNA, 24 nt, Artificial Sequence
  Synthetic oligonucleotide: TRBC-544
cugcucaggcaguaucuggaguca

SEQ ID NO: 50507 - RNA, 18 nt, Artificial Sequence
  Synthetic oligonucleotide: TRBC-545
cucuugaccuguggaaga

SEQ ID NO: 50508 - RNA, 19 nt, Artificial Sequence
  Synthetic oligonucleotide: TRBC-546
ucucuugaccuguggaaga

SEQ ID NO: 50509 - RNA, 20 nt, Artificial Sequence
  Synthetic oligonucleotide: TRBC-547
uucucuugaccuguggaaga

SEQ ID NO: 50510 - RNA, 21 nt, Artificial Sequence
  Synthetic oligonucleotide: TRBC-548
uuucucuugaccuguggaaga

SEQ ID NO: 50511 - RNA, 22 nt, Artificial Sequence
  Synthetic oligonucleotide: TRBC-549
cuuucucuugaccuguggaaga

SEQ ID NO: 50512 - RNA, 23 nt, Artificial Sequence
  Synthetic oligonucleotide: TRBC-550
ccuuucucuugaccuguggaaga

SEQ ID NO: 50513 - RNA, 24 nt, Artificial Sequence
  Synthetic oligonucleotide: TRBC-551
uccuuucucuugaccuguggaaga

SEQ ID NO: 50514 - RNA, 18 nt, Artificial Sequence
  Synthetic oligonucleotide: TRBC-552
auagaggaugguggcaga

SEQ ID NO: 50515 - RNA, 19 nt, Artificial Sequence
  Synthetic oligonucleotide: TRBC-553
cauagaggaugguggcaga

SEQ ID NO: 50516 - RNA, 20 nt, Artificial Sequence
  Synthetic oligonucleotide: TRBC-554
ucauagaggaugguggcaga

SEQ ID NO: 50517 - RNA, 21 nt, Artificial Sequence
  Synthetic oligonucleotide: TRBC-555
cucauagaggaugguggcaga

SEQ ID NO: 50518 - RNA, 22 nt, Artificial Sequence
  Synthetic oligonucleotide: TRBC-556
ucucauagaggaugguggcaga

SEQ ID NO: 50519 - RNA, 23 nt, Artificial Sequence
  Synthetic oligonucleotide: TRBC-557
aucucauagaggaugguggcaga

SEQ ID NO: 50520 - RNA, 24 nt, Artificial Sequence
  Synthetic oligonucleotide: TRBC-558
gaucucauagaggaugguggcaga

SEQ ID NO: 50521 - RNA, 18 nt, Artificial Sequence
  Synthetic oligonucleotide: TRBC-559
uuuuucagguccucugga

SEQ ID NO: 50522 - RNA, 19 nt, Artificial Sequence
  Synthetic oligonucleotide: TRBC-560
guuuuucagguccucugga

SEQ ID NO: 50523 - RNA, 20 nt, Artificial Sequence
  Synthetic oligonucleotide: TRBC-561
cguuuuucagguccucugga

SEQ ID NO: 50524 - RNA, 21 nt, Artificial Sequence
  Synthetic oligonucleotide: TRBC-562
acguuuuucagguccucugga

SEQ ID NO: 50525 - RNA, 22 nt, Artificial Sequence
  Synthetic oligonucleotide: TRBC-563
cacguuuuucagguccucugga

SEQ ID NO: 50526 - RNA, 23 nt, Artificial Sequence
  Synthetic oligonucleotide: TRBC-564
acacguuuuucagguccucugga

SEQ ID NO: 50527 - RNA, 24 nt, Artificial Sequence
  Synthetic oligonucleotide: TRBC-565
aacacguuuuucagguccucugga

SEQ ID NO: 50528 - RNA, 18 nt, Artificial Sequence
  Synthetic oligonucleotide: TRBC-566
ggugaagccacagucuga

SEQ ID NO: 50529 - RNA, 19 nt, Artificial Sequence
  Synthetic oligonucleotide: TRBC-567
aggugaagccacagucuga

SEQ ID NO: 50530 - RNA, 20 nt, Artificial Sequence
  Synthetic oligonucleotide: TRBC-568
gaggugaagccacagucuga

SEQ ID NO: 50531 - RNA, 21 nt, Artificial Sequence
  Synthetic oligonucleotide: TRBC-569
ggaggugaagccacagucuga

SEQ ID NO: 50532 - RNA, 22 nt, Artificial Sequence
  Synthetic oligonucleotide: TRBC-570
cggaggugaagccacagucuga

SEQ ID NO: 50533 - RNA, 23 nt, Artificial Sequence
  Synthetic oligonucleotide: TRBC-571
ccggaggugaagccacagucuga

SEQ ID NO: 50534 - RNA, 24 nt, Artificial Sequence
  Synthetic oligonucleotide: TRBC-572
accggaggugaagccacagucuga

SEQ ID NO: 50535 - RNA, 18 nt, Artificial Sequence
  Synthetic oligonucleotide: TRBC-573
cuggaaagggaagaggua

SEQ ID NO: 50536 - RNA, 19 nt, Artificial Sequence
  Synthetic oligonucleotide: TRBC-574
ucuggaaagggaagaggua

SEQ ID NO: 50537 - RNA, 20 nt, Artificial Sequence
  Synthetic oligonucleotide: TRBC-575
cucuggaaagggaagaggua

SEQ ID NO: 50538 - RNA, 21 nt, Artificial Sequence
  Synthetic oligonucleotide: TRBC-576
ccucuggaaagggaagaggua

SEQ ID NO: 50539 - RNA, 22 nt, Artificial Sequence
  Synthetic oligonucleotide: TRBC-577
uccucuggaaagggaagaggua

SEQ ID NO: 50540 - RNA, 23 nt, Artificial Sequence
  Synthetic oligonucleotide: TRBC-578
guccucuggaaagggaagaggua

SEQ ID NO: 50541 - RNA, 24 nt, Artificial Sequence
  Synthetic oligonucleotide: TRBC-579
gguccucuggaaagggaagaggua

SEQ ID NO: 50542 - RNA, 18 nt, Artificial Sequence
  Synthetic oligonucleotide: TRBC-580
aaaggagagacucacuua

SEQ ID NO: 50543 - RNA, 19 nt, Artificial Sequence
  Synthetic oligonucleotide: TRBC-581
aaaaggagagacucacuua

SEQ ID NO: 50544 - RNA, 20 nt, Artificial Sequence
  Synthetic oligonucleotide: TRBC-582
aaaaaggagagacucacuua

SEQ ID NO: 50545 - RNA, 21 nt, Artificial Sequence
  Synthetic oligonucleotide: TRBC-583
gaaaaaggagagacucacuua

SEQ ID NO: 50546 - RNA, 22 nt, Artificial Sequence
  Synthetic oligonucleotide: TRBC-584
agaaaaaggagagacucacuua

SEQ ID NO: 50547 - RNA, 23 nt, Artificial Sequence
  Synthetic oligonucleotide: TRBC-585
gagaaaaaggagagacucacuua

SEQ ID NO: 50548 - RNA, 24 nt, Artificial Sequence
  Synthetic oligonucleotide: TRBC-586
agagaaaaaggagagacucacuua

SEQ ID NO: 50549 - RNA, 18 nt, Artificial Sequence
  Synthetic oligonucleotide: TRBC-587
cacagucugaaagaaaac

SEQ ID NO: 50550 - RNA, 19 nt, Artificial Sequence
  Synthetic oligonucleotide: TRBC-588
ccacagucugaaagaaaac

SEQ ID NO: 50551 - RNA, 20 nt, Artificial Sequence
  Synthetic oligonucleotide: TRBC-205
gccacagucugaaagaaaac

SEQ ID NO: 50552 - RNA, 21 nt, Artificial Sequence
  Synthetic oligonucleotide: TRBC-589
agccacagucugaaagaaaac

SEQ ID NO: 50553 - RNA, 22 nt, Artificial Sequence
  Synthetic oligonucleotide: TRBC-590
aagccacagucugaaagaaaac

SEQ ID NO: 50554 - RNA, 23 nt, Artificial Sequence
  Synthetic oligonucleotide: TRBC-591
gaagccacagucugaaagaaaac

SEQ ID NO: 50555 - RNA, 24 nt, Artificial Sequence
  Synthetic oligonucleotide: TRBC-592
ugaagccacagucugaaagaaaac

SEQ ID NO: 50556 - RNA, 18 nt, Artificial Sequence
  Synthetic oligonucleotide: TRBC-593
uaccauggccaucagcac

SEQ ID NO: 50557 - RNA, 19 nt, Artificial Sequence
  Synthetic oligonucleotide: TRBC-594
uuaccauggccaucagcac

SEQ ID NO: 50558 - RNA, 20 nt, Artificial Sequence
  Synthetic oligonucleotide: TRBC-595
cuuaccauggccaucagcac

SEQ ID NO: 50559 - RNA, 21 nt, Artificial Sequence
  Synthetic oligonucleotide: TRBC-596
ccuuaccauggccaucagcac

SEQ ID NO: 50560 - RNA, 22 nt, Artificial Sequence
  Synthetic oligonucleotide: TRBC-597
uccuuaccauggccaucagcac

SEQ ID NO: 50561 - RNA, 23 nt, Artificial Sequence
  Synthetic oligonucleotide: TRBC-598
cuccuuaccauggccaucagcac

SEQ ID NO: 50562 - RNA, 24 nt, Artificial Sequence
  Synthetic oligonucleotide: TRBC-599
ccuccuuaccauggccaucagcac

SEQ ID NO: 50563 - RNA, 18 nt, Artificial Sequence
  Synthetic oligonucleotide: TRBC-600
ugguaagacucuguugac

SEQ ID NO: 50564 - RNA, 19 nt, Artificial Sequence
  Synthetic oligonucleotide: TRBC-601
cugguaagacucuguugac

SEQ ID NO: 50565 - RNA, 20 nt, Artificial Sequence
  Synthetic oligonucleotide: TRBC-602
gcugguaagacucuguugac

SEQ ID NO: 50566 - RNA, 21 nt, Artificial Sequence
  Synthetic oligonucleotide: TRBC-603
ugcugguaagacucuguugac

SEQ ID NO: 50567 - RNA, 22 nt, Artificial Sequence
  Synthetic oligonucleotide: TRBC-604
uugcugguaagacucuguugac

SEQ ID NO: 50568 - RNA, 23 nt, Artificial Sequence
  Synthetic oligonucleotide: TRBC-605
cuugcugguaagacucuguugac

SEQ ID NO: 50569 - RNA, 24 nt, Artificial Sequence
  Synthetic oligonucleotide: TRBC-606
ccuugcugguaagacucuguugac

SEQ ID NO: 50570 - RNA, 18 nt, Artificial Sequence
  Synthetic oligonucleotide: TRBC-607
aaggagagacucacuuac

SEQ ID NO: 50571 - RNA, 19 nt, Artificial Sequence
  Synthetic oligonucleotide: TRBC-608
aaaggagagacucacuuac

SEQ ID NO: 50572 - RNA, 20 nt, Artificial Sequence
  Synthetic oligonucleotide: TRBC-212
aaaaggagagacucacuuac

SEQ ID NO: 50573 - RNA, 21 nt, Artificial Sequence
  Synthetic oligonucleotide: TRBC-609
aaaaaggagagacucacuuac

SEQ ID NO: 50574 - RNA, 22 nt, Artificial Sequence
  Synthetic oligonucleotide: TRBC-610
gaaaaaggagagacucacuuac

SEQ ID NO: 50575 - RNA, 23 nt, Artificial Sequence
  Synthetic oligonucleotide: TRBC-611
agaaaaaggagagacucacuuac

SEQ ID NO: 50576 - RNA, 24 nt, Artificial Sequence
  Synthetic oligonucleotide: TRBC-612
gagaaaaaggagagacucacuuac

SEQ ID NO: 50577 - RNA, 18 nt, Artificial Sequence
  Synthetic oligonucleotide: TRBC-613
uugagggcgggcugcucc

SEQ ID NO: 50578 - RNA, 19 nt, Artificial Sequence
  Synthetic oligonucleotide: TRBC-614
auugagggcgggcugcucc

SEQ ID NO: 50579 - RNA, 20 nt, Artificial Sequence
  Synthetic oligonucleotide: TRBC-615
cauugagggcgggcugcucc

SEQ ID NO: 50580 - RNA, 21 nt, Artificial Sequence
  Synthetic oligonucleotide: TRBC-616
ucauugagggcgggcugcucc

SEQ ID NO: 50581 - RNA, 22 nt, Artificial Sequence
  Synthetic oligonucleotide: TRBC-617
gucauugagggcgggcugcucc

SEQ ID NO: 50582 - RNA, 23 nt, Artificial Sequence
  Synthetic oligonucleotide: TRBC-618
agucauugagggcgggcugcucc

SEQ ID NO: 50583 - RNA, 24 nt, Artificial Sequence
  Synthetic oligonucleotide: TRBC-619
gagucauugagggcgggcugcucc

SEQ ID NO: 50584 - RNA, 18 nt, Artificial Sequence
  Synthetic oligonucleotide: TRBC-620
guccacucgucauucucc

SEQ ID NO: 50585 - RNA, 19 nt, Artificial Sequence
  Synthetic oligonucleotide: TRBC-621
gguccacucgucauucucc

SEQ ID NO: 50586 - RNA, 20 nt, Artificial Sequence
  Synthetic oligonucleotide: TRBC-622
ggguccacucgucauucucc

SEQ ID NO: 50587 - RNA, 21 nt, Artificial Sequence
  Synthetic oligonucleotide: TRBC-623
uggguccacucgucauucucc

SEQ ID NO: 50588 - RNA, 22 nt, Artificial Sequence
  Synthetic oligonucleotide: TRBC-624
cuggguccacucgucauucucc

SEQ ID NO: 50589 - RNA, 23 nt, Artificial Sequence
  Synthetic oligonucleotide: TRBC-625
ccuggguccacucgucauucucc

SEQ ID NO: 50590 - RNA, 24 nt, Artificial Sequence
  Synthetic oligonucleotide: TRBC-626
uccuggguccacucgucauucucc

SEQ ID NO: 50591 - RNA, 18 nt, Artificial Sequence
  Synthetic oligonucleotide: TRBC-627
cuuaccauggccaucagc

SEQ ID NO: 50592 - RNA, 19 nt, Artificial Sequence
  Synthetic oligonucleotide: TRBC-628
ccuuaccauggccaucagc

SEQ ID NO: 50593 - RNA, 20 nt, Artificial Sequence
  Synthetic oligonucleotide: TRBC-629
uccuuaccauggccaucagc

SEQ ID NO: 50594 - RNA, 21 nt, Artificial Sequence
  Synthetic oligonucleotide: TRBC-630
cuccuuaccauggccaucagc

SEQ ID NO: 50595 - RNA, 22 nt, Artificial Sequence
  Synthetic oligonucleotide: TRBC-631
ccuccuuaccauggccaucagc

SEQ ID NO: 50596 - RNA, 23 nt, Artificial Sequence
  Synthetic oligonucleotide: TRBC-632
uccuccuuaccauggccaucagc

SEQ ID NO: 50597 - RNA, 24 nt, Artificial Sequence
  Synthetic oligonucleotide: TRBC-633
cuccuccuuaccauggccaucagc

SEQ ID NO: 50598 - RNA, 18 nt, Artificial Sequence
  Synthetic oligonucleotide: TRBC-634
gggaagagguaauggggc

SEQ ID NO: 50599 - RNA, 19 nt, Artificial Sequence
  Synthetic oligonucleotide: TRBC-635
agggaagagguaauggggc

SEQ ID NO: 50600 - RNA, 20 nt, Artificial Sequence
  Synthetic oligonucleotide: TRBC-636
aagggaagagguaauggggc

SEQ ID NO: 50601 - RNA, 21 nt, Artificial Sequence
  Synthetic oligonucleotide: TRBC-637
aaagggaagagguaauggggc

SEQ ID NO: 50602 - RNA, 22 nt, Artificial Sequence
  Synthetic oligonucleotide: TRBC-638
gaaagggaagagguaauggggc

SEQ ID NO: 50603 - RNA, 23 nt, Artificial Sequence
  Synthetic oligonucleotide: TRBC-639
ggaaagggaagagguaauggggc

SEQ ID NO: 50604 - RNA, 24 nt, Artificial Sequence
  Synthetic oligonucleotide: TRBC-640
uggaaagggaagagguaauggggc

SEQ ID NO: 50605 - RNA, 18 nt, Artificial Sequence
  Synthetic oligonucleotide: TRBC-641
ugguugcggggguucugc

SEQ ID NO: 50606 - RNA, 19 nt, Artificial Sequence
  Synthetic oligonucleotide: TRBC-642
gugguugcggggguucugc

SEQ ID NO: 50607 - RNA, 20 nt, Artificial Sequence
  Synthetic oligonucleotide: TRBC-643
agugguugcggggguucugc

SEQ ID NO: 50608 - RNA, 21 nt, Artificial Sequence
  Synthetic oligonucleotide: TRBC-644
aagugguugcggggguucugc

SEQ ID NO: 50609 - RNA, 22 nt, Artificial Sequence
  Synthetic oligonucleotide: TRBC-645
gaagugguugcggggguucugc

SEQ ID NO: 50610 - RNA, 23 nt, Artificial Sequence
  Synthetic oligonucleotide: TRBC-646
ggaagugguugcggggguucugc

SEQ ID NO: 50611 - RNA, 24 nt, Artificial Sequence
  Synthetic oligonucleotide: TRBC-647
cggaagugguugcggggguucugc

SEQ ID NO: 50612 - RNA, 18 nt, Artificial Sequence
  Synthetic oligonucleotide: TRBC-648
cacguuuuucagguccuc

SEQ ID NO: 50613 - RNA, 19 nt, Artificial Sequence
  Synthetic oligonucleotide: TRBC-649
acacguuuuucagguccuc

SEQ ID NO: 50614 - RNA, 20 nt, Artificial Sequence
  Synthetic oligonucleotide: TRBC-31
aacacguuuuucagguccuc

SEQ ID NO: 50615 - RNA, 21 nt, Artificial Sequence
  Synthetic oligonucleotide: TRBC-650
gaacacguuuuucagguccuc

SEQ ID NO: 50616 - RNA, 22 nt, Artificial Sequence
  Synthetic oligonucleotide: TRBC-651
ggaacacguuuuucagguccuc

SEQ ID NO: 50617 - RNA, 23 nt, Artificial Sequence
  Synthetic oligonucleotide: TRBC-652
gggaacacguuuuucagguccuc

SEQ ID NO: 50618 - RNA, 24 nt, Artificial Sequence
  Synthetic oligonucleotide: TRBC-653
ugggaacacguuuuucagguccuc

SEQ ID NO: 50619 - RNA, 18 nt, Artificial Sequence
  Synthetic oligonucleotide: TRBC-654
cagucugaaagaaaacag

SEQ ID NO: 50620 - RNA, 19 nt, Artificial Sequence
  Synthetic oligonucleotide: TRBC-655
acagucugaaagaaaacag

SEQ ID NO: 50621 - RNA, 20 nt, Artificial Sequence
  Synthetic oligonucleotide: TRBC-239
cacagucugaaagaaaacag

SEQ ID NO: 50622 - RNA, 21 nt, Artificial Sequence
  Synthetic oligonucleotide: TRBC-656
ccacagucugaaagaaaacag

SEQ ID NO: 50623 - RNA, 22 nt, Artificial Sequence
  Synthetic oligonucleotide: TRBC-657
gccacagucugaaagaaaacag

SEQ ID NO: 50624 - RNA, 23 nt, Artificial Sequence
  Synthetic oligonucleotide: TRBC-658
agccacagucugaaagaaaacag

SEQ ID NO: 50625 - RNA, 24 nt, Artificial Sequence
  Synthetic oligonucleotide: TRBC-659
aagccacagucugaaagaaaacag

SEQ ID NO: 50626 - RNA, 18 nt, Artificial Sequence
  Synthetic oligonucleotide: TRBC-660
uagaacuggacuugacag

SEQ ID NO: 50627 - RNA, 19 nt, Artificial Sequence
  Synthetic oligonucleotide: TRBC-661
guagaacuggacuugacag

SEQ ID NO: 50628 - RNA, 20 nt, Artificial Sequence
  Synthetic oligonucleotide: TRBC-34
cguagaacuggacuugacag

SEQ ID NO: 50629 - RNA, 21 nt, Artificial Sequence
  Synthetic oligonucleotide: TRBC-662
ccguagaacuggacuugacag

SEQ ID NO: 50630 - RNA, 22 nt, Artificial Sequence
  Synthetic oligonucleotide: TRBC-663
cccguagaacuggacuugacag

SEQ ID NO: 50631 - RNA, 23 nt, Artificial Sequence
  Synthetic oligonucleotide: TRBC-664
gcccguagaacuggacuugacag

SEQ ID NO: 50632 - RNA, 24 nt, Artificial Sequence
  Synthetic oligonucleotide: TRBC-665
agcccguagaacuggacuugacag

SEQ ID NO: 50633 - RNA, 18 nt, Artificial Sequence
  Synthetic oligonucleotide: TRBC-666
gagacucacuuaccggag

SEQ ID NO: 50634 - RNA, 19 nt, Artificial Sequence
  Synthetic oligonucleotide: TRBC-667
agagacucacuuaccggag

SEQ ID NO: 50635 - RNA, 20 nt, Artificial Sequence
  Synthetic oligonucleotide: TRBC-668
gagagacucacuuaccggag

SEQ ID NO: 50636 - RNA, 21 nt, Artificial Sequence
  Synthetic oligonucleotide: TRBC-669
ggagagacucacuuaccggag

SEQ ID NO: 50637 - RNA, 22 nt, Artificial Sequence
  Synthetic oligonucleotide: TRBC-670
aggagagacucacuuaccggag

SEQ ID NO: 50638 - RNA, 23 nt, Artificial Sequence
  Synthetic oligonucleotide: TRBC-671
aaggagagacucacuuaccggag

SEQ ID NO: 50639 - RNA, 24 nt, Artificial Sequence
  Synthetic oligonucleotide: TRBC-672
aaaggagagacucacuuaccggag

SEQ ID NO: 50640 - RNA, 18 nt, Artificial Sequence
  Synthetic oligonucleotide: TRBC-673
ucauucuccgagagcccg

SEQ ID NO: 50641 - RNA, 19 nt, Artificial Sequence
  Synthetic oligonucleotide: TRBC-674
gucauucuccgagagcccg

SEQ ID NO: 50642 - RNA, 20 nt, Artificial Sequence
  Synthetic oligonucleotide: TRBC-675
cgucauucuccgagagcccg

SEQ ID NO: 50643 - RNA, 21 nt, Artificial Sequence
  Synthetic oligonucleotide: TRBC-676
ucgucauucuccgagagcccg

SEQ ID NO: 50644 - RNA, 22 nt, Artificial Sequence
  Synthetic oligonucleotide: TRBC-677
cucgucauucuccgagagcccg

SEQ ID NO: 50645 - RNA, 23 nt, Artificial Sequence
  Synthetic oligonucleotide: TRBC-678
acucgucauucuccgagagcccg

SEQ ID NO: 50646 - RNA, 24 nt, Artificial Sequence
  Synthetic oligonucleotide: TRBC-679
cacucgucauucuccgagagcccg

SEQ ID NO: 50647 - RNA, 18 nt, Artificial Sequence
  Synthetic oligonucleotide: TRBC-680
uaucuggagucauugagg

SEQ ID NO: 50648 - RNA, 19 nt, Artificial Sequence
  Synthetic oligonucleotide: TRBC-681
guaucuggagucauugagg

SEQ ID NO: 50649 - RNA, 20 nt, Artificial Sequence
  Synthetic oligonucleotide: TRBC-682
aguaucuggagucauugagg

SEQ ID NO: 50650 - RNA, 21 nt, Artificial Sequence
  Synthetic oligonucleotide: TRBC-683
caguaucuggagucauugagg

SEQ ID NO: 50651 - RNA, 22 nt, Artificial Sequence
  Synthetic oligonucleotide: TRBC-684
gcaguaucuggagucauugagg

SEQ ID NO: 50652 - RNA, 23 nt, Artificial Sequence
  Synthetic oligonucleotide: TRBC-685
ggcaguaucuggagucauugagg

SEQ ID NO: 50653 - RNA, 24 nt, Artificial Sequence
  Synthetic oligonucleotide: TRBC-686
aggcaguaucuggagucauugagg

SEQ ID NO: 50654 - RNA, 18 nt, Artificial Sequence
  Synthetic oligonucleotide: TRBC-687
caaacacagcgaccucgg

SEQ ID NO: 50655 - RNA, 19 nt, Artificial Sequence
  Synthetic oligonucleotide: TRBC-688
ucaaacacagcgaccucgg

SEQ ID NO: 50656 - RNA, 20 nt, Artificial Sequence
  Synthetic oligonucleotide: TRBC-689
cucaaacacagcgaccucgg

SEQ ID NO: 50657 - RNA, 21 nt, Artificial Sequence
  Synthetic oligonucleotide: TRBC-690
gcucaaacacagcgaccucgg

SEQ ID NO: 50658 - RNA, 22 nt, Artificial Sequence
  Synthetic oligonucleotide: TRBC-691
ggcucaaacacagcgaccucgg

SEQ ID NO: 50659 - RNA, 23 nt, Artificial Sequence
  Synthetic oligonucleotide: TRBC-692
uggcucaaacacagcgaccucgg

SEQ ID NO: 50660 - RNA, 24 nt, Artificial Sequence
  Synthetic oligonucleotide: TRBC-693
auggcucaaacacagcgaccucgg

SEQ ID NO: 50661 - RNA, 18 nt, Artificial Sequence
  Synthetic oligonucleotide: TRBC-694
cagguccucuggaaaggg

SEQ ID NO: 50662 - RNA, 19 nt, Artificial Sequence
  Synthetic oligonucleotide: TRBC-695
ucagguccucuggaaaggg

SEQ ID NO: 50663 - RNA, 20 nt, Artificial Sequence
  Synthetic oligonucleotide: TRBC-696
uucagguccucuggaaaggg

SEQ ID NO: 50664 - RNA, 21 nt, Artificial Sequence
  Synthetic oligonucleotide: TRBC-697
uuucagguccucuggaaaggg

SEQ ID NO: 50665 - RNA, 22 nt, Artificial Sequence
  Synthetic oligonucleotide: TRBC-698
uuuucagguccucuggaaaggg

SEQ ID NO: 50666 - RNA, 23 nt, Artificial Sequence
  Synthetic oligonucleotide: TRBC-699
uuuuucagguccucuggaaaggg

SEQ ID NO: 50667 - RNA, 24 nt, Artificial Sequence
  Synthetic oligonucleotide: TRBC-700
guuuuucagguccucuggaaaggg

SEQ ID NO: 50668 - RNA, 18 nt, Artificial Sequence
  Synthetic oligonucleotide: TRBC-701
aaacacagcgaccucggg

SEQ ID NO: 50669 - RNA, 19 nt, Artificial Sequence
  Synthetic oligonucleotide: TRBC-702
caaacacagcgaccucggg

SEQ ID NO: 50670 - RNA, 20 nt, Artificial Sequence
  Synthetic oligonucleotide: TRBC-45
ucaaacacagcgaccucggg

SEQ ID NO: 50671 - RNA, 21 nt, Artificial Sequence
  Synthetic oligonucleotide: TRBC-703
cucaaacacagcgaccucggg

SEQ ID NO: 50672 - RNA, 22 nt, Artificial Sequence
  Synthetic oligonucleotide: TRBC-704
gcucaaacacagcgaccucggg

SEQ ID NO: 50673 - RNA, 23 nt, Artificial Sequence
  Synthetic oligonucleotide: TRBC-705
ggcucaaacacagcgaccucggg

SEQ ID NO: 50674 - RNA, 24 nt, Artificial Sequence
  Synthetic oligonucleotide: TRBC-706
uggcucaaacacagcgaccucggg

SEQ ID NO: 50675 - RNA, 18 nt, Artificial Sequence
  Synthetic oligonucleotide: TRBC-707
ucugaaagaaaacagggg

SEQ ID NO: 50676 - RNA, 19 nt, Artificial Sequence
  Synthetic oligonucleotide: TRBC-708
gucugaaagaaaacagggg

SEQ ID NO: 50677 - RNA, 20 nt, Artificial Sequence
  Synthetic oligonucleotide: TRBC-709
agucugaaagaaaacagggg

SEQ ID NO: 50678 - RNA, 21 nt, Artificial Sequence
  Synthetic oligonucleotide: TRBC-710
cagucugaaagaaaacagggg

SEQ ID NO: 50679 - RNA, 22 nt, Artificial Sequence
  Synthetic oligonucleotide: TRBC-711
acagucugaaagaaaacagggg

SEQ ID NO: 50680 - RNA, 23 nt, Artificial Sequence
  Synthetic oligonucleotide: TRBC-712
cacagucugaaagaaaacagggg

SEQ ID NO: 50681 - RNA, 24 nt, Artificial Sequence
  Synthetic oligonucleotide: TRBC-713
ccacagucugaaagaaaacagggg

SEQ ID NO: 50682 - RNA, 18 nt, Artificial Sequence
  Synthetic oligonucleotide: TRBC-714
agcuccacguggucgggg

SEQ ID NO: 50683 - RNA, 19 nt, Artificial Sequence
  Synthetic oligonucleotide: TRBC-715
cagcuccacguggucgggg

SEQ ID NO: 50684 - RNA, 20 nt, Artificial Sequence
  Synthetic oligonucleotide: TRBC-716
ucagcuccacguggucgggg

SEQ ID NO: 50685 - RNA, 21 nt, Artificial Sequence
  Synthetic oligonucleotide: TRBC-717
cucagcuccacguggucgggg

SEQ ID NO: 50686 - RNA, 22 nt, Artificial Sequence
  Synthetic oligonucleotide: TRBC-718
gcucagcuccacguggucgggg

SEQ ID NO: 50687 - RNA, 23 nt, Artificial Sequence
  Synthetic oligonucleotide: TRBC-719
agcucagcuccacguggucgggg

SEQ ID NO: 50688 - RNA, 24 nt, Artificial Sequence
  Synthetic oligonucleotide: TRBC-720
cagcucagcuccacguggucgggg

SEQ ID NO: 50689 - RNA, 18 nt, Artificial Sequence
  Synthetic oligonucleotide: TRBC-721
cagcucagcuccacgugg

SEQ ID NO: 50690 - RNA, 19 nt, Artificial Sequence
  Synthetic oligonucleotide: TRBC-722
ccagcucagcuccacgugg

SEQ ID NO: 50691 - RNA, 20 nt, Artificial Sequence
  Synthetic oligonucleotide: TRBC-723
accagcucagcuccacgugg

SEQ ID NO: 50692 - RNA, 21 nt, Artificial Sequence
  Synthetic oligonucleotide: TRBC-724
caccagcucagcuccacgugg

SEQ ID NO: 50693 - RNA, 22 nt, Artificial Sequence
  Synthetic oligonucleotide: TRBC-725
ccaccagcucagcuccacgugg

SEQ ID NO: 50694 - RNA, 23 nt, Artificial Sequence
  Synthetic oligonucleotide: TRBC-726
cccaccagcucagcuccacgugg

SEQ ID NO: 50695 - RNA, 24 nt, Artificial Sequence
  Synthetic oligonucleotide: TRBC-727
acccaccagcucagcuccacgugg

SEQ ID NO: 50696 - RNA, 18 nt, Artificial Sequence
  Synthetic oligonucleotide: TRBC-728
gguucugccagaaggugg

SEQ ID NO: 50697 - RNA, 19 nt, Artificial Sequence
  Synthetic oligonucleotide: TRBC-729
ggguucugccagaaggugg

SEQ ID NO: 50698 - RNA, 20 nt, Artificial Sequence
  Synthetic oligonucleotide: TRBC-730
gggguucugccagaaggugg

SEQ ID NO: 50699 - RNA, 21 nt, Artificial Sequence
  Synthetic oligonucleotide: TRBC-731
ggggguucugccagaaggugg

SEQ ID NO: 50700 - RNA, 22 nt, Artificial Sequence
  Synthetic oligonucleotide: TRBC-732
cggggguucugccagaaggugg

SEQ ID NO: 50701 - RNA, 23 nt, Artificial Sequence
  Synthetic oligonucleotide: TRBC-733
gcggggguucugccagaaggugg

SEQ ID NO: 50702 - RNA, 24 nt, Artificial Sequence
  Synthetic oligonucleotide: TRBC-734
ugcggggguucugccagaaggugg

SEQ ID NO: 50703 - RNA, 18 nt, Artificial Sequence
  Synthetic oligonucleotide: TRBC-735
cuuucucuugaccugugg

SEQ ID NO: 50704 - RNA, 19 nt, Artificial Sequence
  Synthetic oligonucleotide: TRBC-736
ccuuucucuugaccugugg

SEQ ID NO: 50705 - RNA, 20 nt, Artificial Sequence
  Synthetic oligonucleotide: TRBC-737
uccuuucucuugaccugugg

SEQ ID NO: 50706 - RNA, 21 nt, Artificial Sequence
  Synthetic oligonucleotide: TRBC-738
auccuuucucuugaccugugg

SEQ ID NO: 50707 - RNA, 22 nt, Artificial Sequence
  Synthetic oligonucleotide: TRBC-739
aauccuuucucuugaccugugg

SEQ ID NO: 50708 - RNA, 23 nt, Artificial Sequence
  Synthetic oligonucleotide: TRBC-740
gaauccuuucucuugaccugugg

SEQ ID NO: 50709 - RNA, 24 nt, Artificial Sequence
  Synthetic oligonucleotide: TRBC-741
ggaauccuuucucuugaccugugg

SEQ ID NO: 50710 - RNA, 18 nt, Artificial Sequence
  Synthetic oligonucleotide: TRBC-742
auccuuucucuugaccug

SEQ ID NO: 50711 - RNA, 19 nt, Artificial Sequence
  Synthetic oligonucleotide: TRBC-743
aauccuuucucuugaccug

SEQ ID NO: 50712 - RNA, 20 nt, Artificial Sequence
  Synthetic oligonucleotide: TRBC-259
gaauccuuucucuugaccug

SEQ ID NO: 50713 - RNA, 21 nt, Artificial Sequence
  Synthetic oligonucleotide: TRBC-744
ggaauccuuucucuugaccug

SEQ ID NO: 50714 - RNA, 22 nt, Artificial Sequence
  Synthetic oligonucleotide: TRBC-745
uggaauccuuucucuugaccug

SEQ ID NO: 50715 - RNA, 23 nt, Artificial Sequence
  Synthetic oligonucleotide: TRBC-746
cuggaauccuuucucuugaccug

SEQ ID NO: 50716 - RNA, 24 nt, Artificial Sequence
  Synthetic oligonucleotide: TRBC-747
ucuggaauccuuucucuugaccug

SEQ ID NO: 50717 - RNA, 18 nt, Artificial Sequence
  Synthetic oligonucleotide: TRBC-748
aguguggccuuuugggug

SEQ ID NO: 50718 - RNA, 19 nt, Artificial Sequence
  Synthetic oligonucleotide: TRBC-749
caguguggccuuuugggug

SEQ ID NO: 50719 - RNA, 20 nt, Artificial Sequence
  Synthetic oligonucleotide: TRBC-266
ccaguguggccuuuugggug

SEQ ID NO: 50720 - RNA, 21 nt, Artificial Sequence
  Synthetic oligonucleotide: TRBC-750
accaguguggccuuuugggug

SEQ ID NO: 50721 - RNA, 22 nt, Artificial Sequence
  Synthetic oligonucleotide: TRBC-751
caccaguguggccuuuugggug

SEQ ID NO: 50722 - RNA, 23 nt, Artificial Sequence
  Synthetic oligonucleotide: TRBC-752
acaccaguguggccuuuugggug

SEQ ID NO: 50723 - RNA, 24 nt, Artificial Sequence
  Synthetic oligonucleotide: TRBC-753
cacaccaguguggccuuuugggug

SEQ ID NO: 50724 - RNA, 18 nt, Artificial Sequence
  Synthetic oligonucleotide: TRBC-754
agggcgggcugcuccuug

SEQ ID NO: 50725 - RNA, 19 nt, Artificial Sequence
  Synthetic oligonucleotide: TRBC-755
gagggcgggcugcuccuug

SEQ ID NO: 50726 - RNA, 20 nt, Artificial Sequence
  Synthetic oligonucleotide: TRBC-268
ugagggcgggcugcuccuug

SEQ ID NO: 50727 - RNA, 21 nt, Artificial Sequence
  Synthetic oligonucleotide: TRBC-756
uugagggcgggcugcuccuug

SEQ ID NO: 50728 - RNA, 22 nt, Artificial Sequence
  Synthetic oligonucleotide: TRBC-757
auugagggcgggcugcuccuug

SEQ ID NO: 50729 - RNA, 23 nt, Artificial Sequence
  Synthetic oligonucleotide: TRBC-758
cauugagggcgggcugcuccuug

SEQ ID NO: 50730 - RNA, 24 nt, Artificial Sequence
  Synthetic oligonucleotide: TRBC-759
ucauugagggcgggcugcuccuug

SEQ ID NO: 50731 - RNA, 18 nt, Artificial Sequence
  Synthetic oligonucleotide: TRBC-760
ugacagcggaagugguug

SEQ ID NO: 50732 - RNA, 19 nt, Artificial Sequence
  Synthetic oligonucleotide: TRBC-761
uugacagcggaagugguug

SEQ ID NO: 50733 - RNA, 20 nt, Artificial Sequence
  Synthetic oligonucleotide: TRBC-48
cuugacagcggaagugguug

SEQ ID NO: 50734 - RNA, 21 nt, Artificial Sequence
  Synthetic oligonucleotide: TRBC-762
acuugacagcggaagugguug

SEQ ID NO: 50735 - RNA, 22 nt, Artificial Sequence
  Synthetic oligonucleotide: TRBC-763
gacuugacagcggaagugguug

SEQ ID NO: 50736 - RNA, 23 nt, Artificial Sequence
  Synthetic oligonucleotide: TRBC-764
ggacuugacagcggaagugguug

SEQ ID NO: 50737 - RNA, 24 nt, Artificial Sequence
  Synthetic oligonucleotide: TRBC-765
uggacuugacagcggaagugguug

SEQ ID NO: 50738 - RNA, 18 nt, Artificial Sequence
  Synthetic oligonucleotide: TRBC-766
cggcugcucaggcaguau

SEQ ID NO: 50739 - RNA, 19 nt, Artificial Sequence
  Synthetic oligonucleotide: TRBC-767
gcggcugcucaggcaguau

SEQ ID NO: 50740 - RNA, 20 nt, Artificial Sequence
  Synthetic oligonucleotide: TRBC-768
ggcggcugcucaggcaguau

SEQ ID NO: 50741 - RNA, 21 nt, Artificial Sequence
  Synthetic oligonucleotide: TRBC-769
aggcggcugcucaggcaguau

SEQ ID NO: 50742 - RNA, 22 nt, Artificial Sequence
  Synthetic oligonucleotide: TRBC-770
caggcggcugcucaggcaguau

SEQ ID NO: 50743 - RNA, 23 nt, Artificial Sequence
  Synthetic oligonucleotide: TRBC-771
ucaggcggcugcucaggcaguau

SEQ ID NO: 50744 - RNA, 24 nt, Artificial Sequence
  Synthetic oligonucleotide: TRBC-772
cucaggcggcugcucaggcaguau

SEQ ID NO: 50745 - RNA, 18 nt, Artificial Sequence
  Synthetic oligonucleotide: TRBC-773
aauccuuucucuugaccu

SEQ ID NO: 50746 - RNA, 19 nt, Artificial Sequence
  Synthetic oligonucleotide: TRBC-774
gaauccuuucucuugaccu

SEQ ID NO: 50747 - RNA, 20 nt, Artificial Sequence
  Synthetic oligonucleotide: TRBC-775
ggaauccuuucucuugaccu

SEQ ID NO: 50748 - RNA, 21 nt, Artificial Sequence
  Synthetic oligonucleotide: TRBC-776
uggaauccuuucucuugaccu

SEQ ID NO: 50749 - RNA, 22 nt, Artificial Sequence
  Synthetic oligonucleotide: TRBC-777
cuggaauccuuucucuugaccu

SEQ ID NO: 50750 - RNA, 23 nt, Artificial Sequence
  Synthetic oligonucleotide: TRBC-778
ucuggaauccuuucucuugaccu

SEQ ID NO: 50751 - RNA, 24 nt, Artificial Sequence
  Synthetic oligonucleotide: TRBC-779
cucuggaauccuuucucuugaccu

SEQ ID NO: 50752 - RNA, 18 nt, Artificial Sequence
  Synthetic oligonucleotide: TRBC-780
ugguuuuggagcuagccu

SEQ ID NO: 50753 - RNA, 19 nt, Artificial Sequence
  Synthetic oligonucleotide: TRBC-781
augguuuuggagcuagccu

SEQ ID NO: 50754 - RNA, 20 nt, Artificial Sequence
  Synthetic oligonucleotide: TRBC-782
gaugguuuuggagcuagccu

SEQ ID NO: 50755 - RNA, 21 nt, Artificial Sequence
  Synthetic oligonucleotide: TRBC-783
ggaugguuuuggagcuagccu

SEQ ID NO: 50756 - RNA, 22 nt, Artificial Sequence
  Synthetic oligonucleotide: TRBC-784
gggaugguuuuggagcuagccu

SEQ ID NO: 50757 - RNA, 23 nt, Artificial Sequence
  Synthetic oligonucleotide: TRBC-785
ugggaugguuuuggagcuagccu

SEQ ID NO: 50758 - RNA, 24 nt, Artificial Sequence
  Synthetic oligonucleotide: TRBC-786
cugggaugguuuuggagcuagccu

SEQ ID NO: 50759 - RNA, 18 nt, Artificial Sequence
  Synthetic oligonucleotide: TRBC-787
acacguuuuucagguccu

SEQ ID NO: 50760 - RNA, 19 nt, Artificial Sequence
  Synthetic oligonucleotide: TRBC-788
aacacguuuuucagguccu

SEQ ID NO: 50761 - RNA, 20 nt, Artificial Sequence
  Synthetic oligonucleotide: TRBC-789
gaacacguuuuucagguccu

SEQ ID NO: 50762 - RNA, 21 nt, Artificial Sequence
  Synthetic oligonucleotide: TRBC-790
ggaacacguuuuucagguccu

SEQ ID NO: 50763 - RNA, 22 nt, Artificial Sequence
  Synthetic oligonucleotide: TRBC-791
gggaacacguuuuucagguccu

SEQ ID NO: 50764 - RNA, 23 nt, Artificial Sequence
  Synthetic oligonucleotide: TRBC-792
ugggaacacguuuuucagguccu

SEQ ID NO: 50765 - RNA, 24 nt, Artificial Sequence
  Synthetic oligonucleotide: TRBC-793
gugggaacacguuuuucagguccu

SEQ ID NO: 50766 - RNA, 18 nt, Artificial Sequence
  Synthetic oligonucleotide: TRBC-794
ggguccacucgucauucu

SEQ ID NO: 50767 - RNA, 19 nt, Artificial Sequence
  Synthetic oligonucleotide: TRBC-795
uggguccacucgucauucu

SEQ ID NO: 50768 - RNA, 20 nt, Artificial Sequence
  Synthetic oligonucleotide: TRBC-796
cuggguccacucgucauucu

SEQ ID NO: 50769 - RNA, 21 nt, Artificial Sequence
  Synthetic oligonucleotide: TRBC-797
ccuggguccacucgucauucu

SEQ ID NO: 50770 - RNA, 22 nt, Artificial Sequence
  Synthetic oligonucleotide: TRBC-798
uccuggguccacucgucauucu

SEQ ID NO: 50771 - RNA, 23 nt, Artificial Sequence
  Synthetic oligonucleotide: TRBC-799
auccuggguccacucgucauucu

SEQ ID NO: 50772 - RNA, 24 nt, Artificial Sequence
  Synthetic oligonucleotide: TRBC-800
uauccuggguccacucgucauucu

SEQ ID NO: 50773 - RNA, 18 nt, Artificial Sequence
  Synthetic oligonucleotide: TRBC-801
cggaggugaagccacagu

SEQ ID NO: 50774 - RNA, 19 nt, Artificial Sequence
  Synthetic oligonucleotide: TRBC-802
ccggaggugaagccacagu

SEQ ID NO: 50775 - RNA, 20 nt, Artificial Sequence
  Synthetic oligonucleotide: TRBC-803
accggaggugaagccacagu

SEQ ID NO: 50776 - RNA, 21 nt, Artificial Sequence
  Synthetic oligonucleotide: TRBC-804
uaccggaggugaagccacagu

SEQ ID NO: 50777 - RNA, 22 nt, Artificial Sequence
  Synthetic oligonucleotide: TRBC-805
uuaccggaggugaagccacagu

SEQ ID NO: 50778 - RNA, 23 nt, Artificial Sequence
  Synthetic oligonucleotide: TRBC-806
cuuaccggaggugaagccacagu

SEQ ID NO: 50779 - RNA, 24 nt, Artificial Sequence
  Synthetic oligonucleotide: TRBC-807
acuuaccggaggugaagccacagu

SEQ ID NO: 50780 - RNA, 18 nt, Artificial Sequence
  Synthetic oligonucleotide: TRBC-808
aacacagcgaccucgggu

SEQ ID NO: 50781 - RNA, 19 nt, Artificial Sequence
  Synthetic oligonucleotide: TRBC-809
aaacacagcgaccucgggu

SEQ ID NO: 50782 - RNA, 20 nt, Artificial Sequence
  Synthetic oligonucleotide: TRBC-52
caaacacagcgaccucgggu

SEQ ID NO: 50783 - RNA, 21 nt, Artificial Sequence
  Synthetic oligonucleotide: TRBC-810
ucaaacacagcgaccucgggu

SEQ ID NO: 50784 - RNA, 22 nt, Artificial Sequence
  Synthetic oligonucleotide: TRBC-811
cucaaacacagcgaccucgggu

SEQ ID NO: 50785 - RNA, 23 nt, Artificial Sequence
  Synthetic oligonucleotide: TRBC-812
gcucaaacacagcgaccucgggu

SEQ ID NO: 50786 - RNA, 24 nt, Artificial Sequence
  Synthetic oligonucleotide: TRBC-813
ggcucaaacacagcgaccucgggu

SEQ ID NO: 50787 - RNA, 18 nt, Artificial Sequence
  Synthetic oligonucleotide: TRBC-814
caguguggccuuuugggu

SEQ ID NO: 50788 - RNA, 19 nt, Artificial Sequence
  Synthetic oligonucleotide: TRBC-815
ccaguguggccuuuugggu

SEQ ID NO: 50789 - RNA, 20 nt, Artificial Sequence
  Synthetic oligonucleotide: TRBC-816
accaguguggccuuuugggu

SEQ ID NO: 50790 - RNA, 21 nt, Artificial Sequence
  Synthetic oligonucleotide: TRBC-817
caccaguguggccuuuugggu

SEQ ID NO: 50791 - RNA, 22 nt, Artificial Sequence
  Synthetic oligonucleotide: TRBC-818
acaccaguguggccuuuugggu

SEQ ID NO: 50792 - RNA, 23 nt, Artificial Sequence
  Synthetic oligonucleotide: TRBC-819
cacaccaguguggccuuuugggu

SEQ ID NO: 50793 - RNA, 24 nt, Artificial Sequence
  Synthetic oligonucleotide: TRBC-820
gcacaccaguguggccuuuugggu

SEQ ID NO: 50794 - RNA, 18 nt, Artificial Sequence
  Synthetic oligonucleotide: TRBC-821
guguggccuuuugggugu

SEQ ID NO: 50795 - RNA, 19 nt, Artificial Sequence
  Synthetic oligonucleotide: TRBC-822
aguguggccuuuugggugu

SEQ ID NO: 50796 - RNA, 20 nt, Artificial Sequence
  Synthetic oligonucleotide: TRBC-286
caguguggccuuuugggugu

SEQ ID NO: 50797 - RNA, 21 nt, Artificial Sequence
  Synthetic oligonucleotide: TRBC-823
ccaguguggccuuuugggugu

SEQ ID NO: 50798 - RNA, 22 nt, Artificial Sequence
  Synthetic oligonucleotide: TRBC-824
accaguguggccuuuugggugu

SEQ ID NO: 50799 - RNA, 23 nt, Artificial Sequence
  Synthetic oligonucleotide: TRBC-825
caccaguguggccuuuugggugu

SEQ ID NO: 50800 - RNA, 24 nt, Artificial Sequence
  Synthetic oligonucleotide: TRBC-826
acaccaguguggccuuuugggugu

SEQ ID NO: 50801 - RNA, 18 nt, Artificial Sequence
  Synthetic oligonucleotide: TRBC-827
gcaguaucuggagucauu

SEQ ID NO: 50802 - RNA, 19 nt, Artificial Sequence
  Synthetic oligonucleotide: TRBC-828
ggcaguaucuggagucauu

SEQ ID NO: 50803 - RNA, 20 nt, Artificial Sequence
  Synthetic oligonucleotide: TRBC-829
aggcaguaucuggagucauu

SEQ ID NO: 50804 - RNA, 21 nt, Artificial Sequence
  Synthetic oligonucleotide: TRBC-830
caggcaguaucuggagucauu

SEQ ID NO: 50805 - RNA, 22 nt, Artificial Sequence
  Synthetic oligonucleotide: TRBC-831
ucaggcaguaucuggagucauu

SEQ ID NO: 50806 - RNA, 23 nt, Artificial Sequence
  Synthetic oligonucleotide: TRBC-832
cucaggcaguaucuggagucauu

SEQ ID NO: 50807 - RNA, 24 nt, Artificial Sequence
  Synthetic oligonucleotide: TRBC-833
gcucaggcaguaucuggagucauu

SEQ ID NO: 50808 - RNA, 18 nt, Artificial Sequence
  Synthetic oligonucleotide: TRBC-834
gagggcgggcugcuccuu

SEQ ID NO: 50809 - RNA, 19 nt, Artificial Sequence
  Synthetic oligonucleotide: TRBC-835
ugagggcgggcugcuccuu

SEQ ID NO: 50810 - RNA, 20 nt, Artificial Sequence
  Synthetic oligonucleotide: TRBC-836
uugagggcgggcugcuccuu

SEQ ID NO: 50811 - RNA, 21 nt, Artificial Sequence
  Synthetic oligonucleotide: TRBC-837
auugagggcgggcugcuccuu

SEQ ID NO: 50812 - RNA, 22 nt, Artificial Sequence
  Synthetic oligonucleotide: TRBC-838
cauugagggcgggcugcuccuu

SEQ ID NO: 50813 - RNA, 23 nt, Artificial Sequence
  Synthetic oligonucleotide: TRBC-839
ucauugagggcgggcugcuccuu

SEQ ID NO: 50814 - RNA, 24 nt, Artificial Sequence
  Synthetic oligonucleotide: TRBC-840
gucauugagggcgggcugcuccuu

SEQ ID NO: 50815 - RNA, 18 nt, Artificial Sequence
  Synthetic oligonucleotide: TRBC-841
gaaugaccugggaugguu

SEQ ID NO: 50816 - RNA, 19 nt, Artificial Sequence
  Synthetic oligonucleotide: TRBC-842
agaaugaccugggaugguu

SEQ ID NO: 50817 - RNA, 20 nt, Artificial Sequence
  Synthetic oligonucleotide: TRBC-843
aagaaugaccugggaugguu

SEQ ID NO: 50818 - RNA, 21 nt, Artificial Sequence
  Synthetic oligonucleotide: TRBC-844
gaagaaugaccugggaugguu

SEQ ID NO: 50819 - RNA, 22 nt, Artificial Sequence
  Synthetic oligonucleotide: TRBC-845
ugaagaaugaccugggaugguu

SEQ ID NO: 50820 - RNA, 23 nt, Artificial Sequence
  Synthetic oligonucleotide: TRBC-846
augaagaaugaccugggaugguu

SEQ ID NO: 50821 - RNA, 24 nt, Artificial Sequence
  Synthetic oligonucleotide: TRBC-847
gaugaagaaugaccugggaugguu

SEQ ID NO: 50822 - RNA, 18 nt, Artificial Sequence
  Synthetic oligonucleotide: TRBC-848
uugacagcggaagugguu

SEQ ID NO: 50823 - RNA, 19 nt, Artificial Sequence
  Synthetic oligonucleotide: TRBC-849
cuugacagcggaagugguu

SEQ ID NO: 50824 - RNA, 20 nt, Artificial Sequence
  Synthetic oligonucleotide: TRBC-850
acuugacagcggaagugguu

SEQ ID NO: 50825 - RNA, 21 nt, Artificial Sequence
  Synthetic oligonucleotide: TRBC-851
gacuugacagcggaagugguu

SEQ ID NO: 50826 - RNA, 22 nt, Artificial Sequence
  Synthetic oligonucleotide: TRBC-852
ggacuugacagcggaagugguu

SEQ ID NO: 50827 - RNA, 23 nt, Artificial Sequence
  Synthetic oligonucleotide: TRBC-853
uggacuugacagcggaagugguu

SEQ ID NO: 50828 - RNA, 24 nt, Artificial Sequence
  Synthetic oligonucleotide: TRBC-854
cuggacuugacagcggaagugguu

SEQ ID NO: 50829 - RNA, 18 nt, Artificial Sequence
  Synthetic oligonucleotide: TRBC-855
aaugaccugggaugguuu

SEQ ID NO: 50830 - RNA, 19 nt, Artificial Sequence
  Synthetic oligonucleotide: TRBC-856
gaaugaccugggaugguuu

SEQ ID NO: 50831 - RNA, 20 nt, Artificial Sequence
  Synthetic oligonucleotide: TRBC-289
agaaugaccugggaugguuu

SEQ ID NO: 50832 - RNA, 21 nt, Artificial Sequence
  Synthetic oligonucleotide: TRBC-857
aagaaugaccugggaugguuu

SEQ ID NO: 50833 - RNA, 22 nt, Artificial Sequence
  Synthetic oligonucleotide: TRBC-858
gaagaaugaccugggaugguuu

SEQ ID NO: 50834 - RNA, 23 nt, Artificial Sequence
  Synthetic oligonucleotide: TRBC-859
ugaagaaugaccugggaugguuu

SEQ ID NO: 50835 - RNA, 24 nt, Artificial Sequence
  Synthetic oligonucleotide: TRBC-860
augaagaaugaccugggaugguuu

SEQ ID NO: 50836 - RNA, 18 nt, Artificial Sequence
  Synthetic oligonucleotide: TRBC-861
cucucuuccacaggucaa

SEQ ID NO: 50837 - RNA, 19 nt, Artificial Sequence
  Synthetic oligonucleotide: TRBC-862
ucucucuuccacaggucaa

SEQ ID NO: 50838 - RNA, 20 nt, Artificial Sequence
  Synthetic oligonucleotide: TRBC-863
uucucucuuccacaggucaa

SEQ ID NO: 50839 - RNA, 21 nt, Artificial Sequence
  Synthetic oligonucleotide: TRBC-864
guucucucuuccacaggucaa

SEQ ID NO: 50840 - RNA, 22 nt, Artificial Sequence
  Synthetic oligonucleotide: TRBC-865
uguucucucuuccacaggucaa

SEQ ID NO: 50841 - RNA, 23 nt, Artificial Sequence
  Synthetic oligonucleotide: TRBC-866
auguucucucuuccacaggucaa

SEQ ID NO: 50842 - RNA, 24 nt, Artificial Sequence
  Synthetic oligonucleotide: TRBC-867
aauguucucucuuccacaggucaa

SEQ ID NO: 50843 - RNA, 18 nt, Artificial Sequence
  Synthetic oligonucleotide: TRBC-868
gcugagcuggugggugaa

SEQ ID NO: 50844 - RNA, 19 nt, Artificial Sequence
  Synthetic oligonucleotide: TRBC-869
agcugagcuggugggugaa

SEQ ID NO: 50845 - RNA, 20 nt, Artificial Sequence
  Synthetic oligonucleotide: TRBC-186
gagcugagcuggugggugaa

SEQ ID NO: 50846 - RNA, 21 nt, Artificial Sequence
  Synthetic oligonucleotide: TRBC-870
ggagcugagcuggugggugaa

SEQ ID NO: 50847 - RNA, 22 nt, Artificial Sequence
  Synthetic oligonucleotide: TRBC-871
uggagcugagcuggugggugaa

SEQ ID NO: 50848 - RNA, 23 nt, Artificial Sequence
  Synthetic oligonucleotide: TRBC-872
guggagcugagcuggugggugaa

SEQ ID NO: 50849 - RNA, 24 nt, Artificial Sequence
  Synthetic oligonucleotide: TRBC-873
cguggagcugagcuggugggugaa

SEQ ID NO: 50850 - RNA, 18 nt, Artificial Sequence
  Synthetic oligonucleotide: TRBC-874
augggaaggaggugcaca

SEQ ID NO: 50851 - RNA, 19 nt, Artificial Sequence
  Synthetic oligonucleotide: TRBC-875
aaugggaaggaggugcaca

SEQ ID NO: 50852 - RNA, 20 nt, Artificial Sequence
  Synthetic oligonucleotide: TRBC-876
gaaugggaaggaggugcaca

SEQ ID NO: 50853 - RNA, 21 nt, Artificial Sequence
  Synthetic oligonucleotide: TRBC-877
ugaaugggaaggaggugcaca

SEQ ID NO: 50854 - RNA, 22 nt, Artificial Sequence
  Synthetic oligonucleotide: TRBC-878
gugaaugggaaggaggugcaca

SEQ ID NO: 50855 - RNA, 23 nt, Artificial Sequence
  Synthetic oligonucleotide: TRBC-879
ggugaaugggaaggaggugcaca

SEQ ID NO: 50856 - RNA, 24 nt, Artificial Sequence
  Synthetic oligonucleotide: TRBC-880
gggugaaugggaaggaggugcaca

SEQ ID NO: 50857 - RNA, 18 nt, Artificial Sequence
  Synthetic oligonucleotide: TRBC-881
uuaccucuucccuuucca

SEQ ID NO: 50858 - RNA, 19 nt, Artificial Sequence
  Synthetic oligonucleotide: TRBC-882
auuaccucuucccuuucca

SEQ ID NO: 50859 - RNA, 20 nt, Artificial Sequence
  Synthetic oligonucleotide: TRBC-883
cauuaccucuucccuuucca

SEQ ID NO: 50860 - RNA, 21 nt, Artificial Sequence
  Synthetic oligonucleotide: TRBC-884
ccauuaccucuucccuuucca

SEQ ID NO: 50861 - RNA, 22 nt, Artificial Sequence
  Synthetic oligonucleotide: TRBC-885
cccauuaccucuucccuuucca

SEQ ID NO: 50862 - RNA, 23 nt, Artificial Sequence
  Synthetic oligonucleotide: TRBC-886
ccccauuaccucuucccuuucca

SEQ ID NO: 50863 - RNA, 24 nt, Artificial Sequence
  Synthetic oligonucleotide: TRBC-887
gccccauuaccucuucccuuucca

SEQ ID NO: 50864 - RNA, 18 nt, Artificial Sequence
  Synthetic oligonucleotide: TRBC-888
cagacccgcagccccuca

SEQ ID NO: 50865 - RNA, 19 nt, Artificial Sequence
  Synthetic oligonucleotide: TRBC-889
acagacccgcagccccuca

SEQ ID NO: 50866 - RNA, 20 nt, Artificial Sequence
  Synthetic oligonucleotide: TRBC-191
cacagacccgcagccccuca

SEQ ID NO: 50867 - RNA, 21 nt, Artificial Sequence
  Synthetic oligonucleotide: TRBC-890
gcacagacccgcagccccuca

SEQ ID NO: 50868 - RNA, 22 nt, Artificial Sequence
  Synthetic oligonucleotide: TRBC-891
agcacagacccgcagccccuca

SEQ ID NO: 50869 - RNA, 23 nt, Artificial Sequence
  Synthetic oligonucleotide: TRBC-892
cagcacagacccgcagccccuca

SEQ ID NO: 50870 - RNA, 24 nt, Artificial Sequence
  Synthetic oligonucleotide: TRBC-893
ucagcacagacccgcagccccuca

SEQ ID NO: 50871 - RNA, 18 nt, Artificial Sequence
  Synthetic oligonucleotide: TRBC-894
gcucucggagaaugacga

SEQ ID NO: 50872 - RNA, 19 nt, Artificial Sequence
  Synthetic oligonucleotide: TRBC-895
ggcucucggagaaugacga

SEQ ID NO: 50873 - RNA, 20 nt, Artificial Sequence
  Synthetic oligonucleotide: TRBC-896
gggcucucggagaaugacga

SEQ ID NO: 50874 - RNA, 21 nt, Artificial Sequence
  Synthetic oligonucleotide: TRBC-897
cgggcucucggagaaugacga

SEQ ID NO: 50875 - RNA, 22 nt, Artificial Sequence
  Synthetic oligonucleotide: TRBC-898
acgggcucucggagaaugacga

SEQ ID NO: 50876 - RNA, 23 nt, Artificial Sequence
  Synthetic oligonucleotide: TRBC-899
uacgggcucucggagaaugacga

SEQ ID NO: 50877 - RNA, 24 nt, Artificial Sequence
  Synthetic oligonucleotide: TRBC-900
cuacgggcucucggagaaugacga

SEQ ID NO: 50878 - RNA, 18 nt, Artificial Sequence
  Synthetic oligonucleotide: TRBC-901
ugacgaguggacccagga

SEQ ID NO: 50879 - RNA, 19 nt, Artificial Sequence
  Synthetic oligonucleotide: TRBC-902
augacgaguggacccagga

SEQ ID NO: 50880 - RNA, 20 nt, Artificial Sequence
  Synthetic oligonucleotide: TRBC-903
aaugacgaguggacccagga

SEQ ID NO: 50881 - RNA, 21 nt, Artificial Sequence
  Synthetic oligonucleotide: TRBC-904
gaaugacgaguggacccagga

SEQ ID NO: 50882 - RNA, 22 nt, Artificial Sequence
  Synthetic oligonucleotide: TRBC-905
agaaugacgaguggacccagga

SEQ ID NO: 50883 - RNA, 23 nt, Artificial Sequence
  Synthetic oligonucleotide: TRBC-906
gagaaugacgaguggacccagga

SEQ ID NO: 50884 - RNA, 24 nt, Artificial Sequence
  Synthetic oligonucleotide: TRBC-907
ggagaaugacgaguggacccagga

SEQ ID NO: 50885 - RNA, 18 nt, Artificial Sequence
  Synthetic oligonucleotide: TRBC-908
gcuggugggugaauggga

SEQ ID NO: 50886 - RNA, 19 nt, Artificial Sequence
  Synthetic oligonucleotide: TRBC-909
agcuggugggugaauggga

SEQ ID NO: 50887 - RNA, 20 nt, Artificial Sequence
  Synthetic oligonucleotide: TRBC-197
gagcuggugggugaauggga

SEQ ID NO: 50888 - RNA, 21 nt, Artificial Sequence
  Synthetic oligonucleotide: TRBC-910
ugagcuggugggugaauggga

SEQ ID NO: 50889 - RNA, 22 nt, Artificial Sequence
  Synthetic oligonucleotide: TRBC-911
cugagcuggugggugaauggga

SEQ ID NO: 50890 - RNA, 23 nt, Artificial Sequence
  Synthetic oligonucleotide: TRBC-912
gcugagcuggugggugaauggga

SEQ ID NO: 50891 - RNA, 24 nt, Artificial Sequence
  Synthetic oligonucleotide: TRBC-913
agcugagcuggugggugaauggga

SEQ ID NO: 50892 - RNA, 18 nt, Artificial Sequence
  Synthetic oligonucleotide: TRBC-914
guaaggaggaggguggga

SEQ ID NO: 50893 - RNA, 19 nt, Artificial Sequence
  Synthetic oligonucleotide: TRBC-915
gguaaggaggaggguggga

SEQ ID NO: 50894 - RNA, 20 nt, Artificial Sequence
  Synthetic oligonucleotide: TRBC-916
ugguaaggaggaggguggga

SEQ ID NO: 50895 - RNA, 21 nt, Artificial Sequence
  Synthetic oligonucleotide: TRBC-917
augguaaggaggaggguggga

SEQ ID NO: 50896 - RNA, 22 nt, Artificial Sequence
  Synthetic oligonucleotide: TRBC-918
caugguaaggaggaggguggga

SEQ ID NO: 50897 - RNA, 23 nt, Artificial Sequence
  Synthetic oligonucleotide: TRBC-919
ccaugguaaggaggaggguggga

SEQ ID NO: 50898 - RNA, 24 nt, Artificial Sequence
  Synthetic oligonucleotide: TRBC-920
gccaugguaaggaggaggguggga

SEQ ID NO: 50899 - RNA, 18 nt, Artificial Sequence
  Synthetic oligonucleotide: TRBC-921
cugggguagagcagguga

SEQ ID NO: 50900 - RNA, 19 nt, Artificial Sequence
  Synthetic oligonucleotide: TRBC-922
ccugggguagagcagguga

SEQ ID NO: 50901 - RNA, 20 nt, Artificial Sequence
  Synthetic oligonucleotide: TRBC-923
gccugggguagagcagguga

SEQ ID NO: 50902 - RNA, 21 nt, Artificial Sequence
  Synthetic oligonucleotide: TRBC-924
ggccugggguagagcagguga

SEQ ID NO: 50903 - RNA, 22 nt, Artificial Sequence
  Synthetic oligonucleotide: TRBC-925
aggccugggguagagcagguga

SEQ ID NO: 50904 - RNA, 23 nt, Artificial Sequence
  Synthetic oligonucleotide: TRBC-926
gaggccugggguagagcagguga

SEQ ID NO: 50905 - RNA, 24 nt, Artificial Sequence
  Synthetic oligonucleotide: TRBC-927
cgaggccugggguagagcagguga

SEQ ID NO: 50906 - RNA, 18 nt, Artificial Sequence
  Synthetic oligonucleotide: TRBC-928
agcugagcugguggguga

SEQ ID NO: 50907 - RNA, 19 nt, Artificial Sequence
  Synthetic oligonucleotide: TRBC-929
gagcugagcugguggguga

SEQ ID NO: 50908 - RNA, 20 nt, Artificial Sequence
  Synthetic oligonucleotide: TRBC-930
ggagcugagcugguggguga

SEQ ID NO: 50909 - RNA, 21 nt, Artificial Sequence
  Synthetic oligonucleotide: TRBC-931
uggagcugagcugguggguga

SEQ ID NO: 50910 - RNA, 22 nt, Artificial Sequence
  Synthetic oligonucleotide: TRBC-932
guggagcugagcugguggguga

SEQ ID NO: 50911 - RNA, 23 nt, Artificial Sequence
  Synthetic oligonucleotide: TRBC-933
cguggagcugagcugguggguga

SEQ ID NO: 50912 - RNA, 24 nt, Artificial Sequence
  Synthetic oligonucleotide: TRBC-934
acguggagcugagcugguggguga

SEQ ID NO: 50913 - RNA, 18 nt, Artificial Sequence
  Synthetic oligonucleotide: TRBC-935
cucuaugagaucuugcua

SEQ ID NO: 50914 - RNA, 19 nt, Artificial Sequence
  Synthetic oligonucleotide: TRBC-936
ccucuaugagaucuugcua

SEQ ID NO: 50915 - RNA, 20 nt, Artificial Sequence
  Synthetic oligonucleotide: TRBC-204
uccucuaugagaucuugcua

SEQ ID NO: 50916 - RNA, 21 nt, Artificial Sequence
  Synthetic oligonucleotide: TRBC-937
auccucuaugagaucuugcua

SEQ ID NO: 50917 - RNA, 22 nt, Artificial Sequence
  Synthetic oligonucleotide: TRBC-938
cauccucuaugagaucuugcua

SEQ ID NO: 50918 - RNA, 23 nt, Artificial Sequence
  Synthetic oligonucleotide: TRBC-939
ccauccucuaugagaucuugcua

SEQ ID NO: 50919 - RNA, 24 nt, Artificial Sequence
  Synthetic oligonucleotide: TRBC-940
accauccucuaugagaucuugcua

SEQ ID NO: 50920 - RNA, 18 nt, Artificial Sequence
  Synthetic oligonucleotide: TRBC-941
gugcugauggccauggua

SEQ ID NO: 50921 - RNA, 19 nt, Artificial Sequence
  Synthetic oligonucleotide: TRBC-942
cgugcugauggccauggua

SEQ ID NO: 50922 - RNA, 20 nt, Artificial Sequence
  Synthetic oligonucleotide: TRBC-27
ucgugcugauggccauggua

SEQ ID NO: 50923 - RNA, 21 nt, Artificial Sequence
  Synthetic oligonucleotide: TRBC-943
cucgugcugauggccauggua

SEQ ID NO: 50924 - RNA, 22 nt, Artificial Sequence
  Synthetic oligonucleotide: TRBC-944
ccucgugcugauggccauggua

SEQ ID NO: 50925 - RNA, 23 nt, Artificial Sequence
  Synthetic oligonucleotide: TRBC-945
cccucgugcugauggccauggua

SEQ ID NO: 50926 - RNA, 24 nt, Artificial Sequence
  Synthetic oligonucleotide: TRBC-946
gcccucgugcugauggccauggua

SEQ ID NO: 50927 - RNA, 18 nt, Artificial Sequence
  Synthetic oligonucleotide: TRBC-947
ggcuucuaccccgaccac

SEQ ID NO: 50928 - RNA, 19 nt, Artificial Sequence
  Synthetic oligonucleotide: TRBC-948
aggcuucuaccccgaccac

SEQ ID NO: 50929 - RNA, 20 nt, Artificial Sequence
  Synthetic oligonucleotide: TRBC-949
caggcuucuaccccgaccac

SEQ ID NO: 50930 - RNA, 21 nt, Artificial Sequence
  Synthetic oligonucleotide: TRBC-950
acaggcuucuaccccgaccac

SEQ ID NO: 50931 - RNA, 22 nt, Artificial Sequence
  Synthetic oligonucleotide: TRBC-951
cacaggcuucuaccccgaccac

SEQ ID NO: 50932 - RNA, 23 nt, Artificial Sequence
  Synthetic oligonucleotide: TRBC-952
ccacaggcuucuaccccgaccac

SEQ ID NO: 50933 - RNA, 24 nt, Artificial Sequence
  Synthetic oligonucleotide: TRBC-953
gccacaggcuucuaccccgaccac

SEQ ID NO: 50934 - RNA, 18 nt, Artificial Sequence
  Synthetic oligonucleotide: TRBC-954
ugaaaaacguguucccac

SEQ ID NO: 50935 - RNA, 19 nt, Artificial Sequence
  Synthetic oligonucleotide: TRBC-955
cugaaaaacguguucccac

SEQ ID NO: 50936 - RNA, 20 nt, Artificial Sequence
  Synthetic oligonucleotide: TRBC-956
ccugaaaaacguguucccac

SEQ ID NO: 50937 - RNA, 21 nt, Artificial Sequence
  Synthetic oligonucleotide: TRBC-957
accugaaaaacguguucccac

SEQ ID NO: 50938 - RNA, 22 nt, Artificial Sequence
  Synthetic oligonucleotide: TRBC-958
gaccugaaaaacguguucccac

SEQ ID NO: 50939 - RNA, 23 nt, Artificial Sequence
  Synthetic oligonucleotide: TRBC-959
ggaccugaaaaacguguucccac

SEQ ID NO: 50940 - RNA, 24 nt, Artificial Sequence
  Synthetic oligonucleotide: TRBC-960
aggaccugaaaaacguguucccac

SEQ ID NO: 50941 - RNA, 18 nt, Artificial Sequence
  Synthetic oligonucleotide: TRBC-961
cuucccuuuccagaggac

SEQ ID NO: 50942 - RNA, 19 nt, Artificial Sequence
  Synthetic oligonucleotide: TRBC-962
ucuucccuuuccagaggac

SEQ ID NO: 50943 - RNA, 20 nt, Artificial Sequence
  Synthetic oligonucleotide: TRBC-963
cucuucccuuuccagaggac

SEQ ID NO: 50944 - RNA, 21 nt, Artificial Sequence
  Synthetic oligonucleotide: TRBC-964
ccucuucccuuuccagaggac

SEQ ID NO: 50945 - RNA, 22 nt, Artificial Sequence
  Synthetic oligonucleotide: TRBC-965
accucuucccuuuccagaggac

SEQ ID NO: 50946 - RNA, 23 nt, Artificial Sequence
  Synthetic oligonucleotide: TRBC-966
uaccucuucccuuuccagaggac

SEQ ID NO: 50947 - RNA, 24 nt, Artificial Sequence
  Synthetic oligonucleotide: TRBC-967
uuaccucuucccuuuccagaggac

SEQ ID NO: 50948 - RNA, 18 nt, Artificial Sequence
  Synthetic oligonucleotide: TRBC-968
gagcaggugaguggggcc

SEQ ID NO: 50949 - RNA, 19 nt, Artificial Sequence
  Synthetic oligonucleotide: TRBC-969
agagcaggugaguggggcc

SEQ ID NO: 50950 - RNA, 20 nt, Artificial Sequence
  Synthetic oligonucleotide: TRBC-217
uagagcaggugaguggggcc

SEQ ID NO: 50951 - RNA, 21 nt, Artificial Sequence
  Synthetic oligonucleotide: TRBC-970
guagagcaggugaguggggcc

SEQ ID NO: 50952 - RNA, 22 nt, Artificial Sequence
  Synthetic oligonucleotide: TRBC-971
gguagagcaggugaguggggcc

SEQ ID NO: 50953 - RNA, 23 nt, Artificial Sequence
  Synthetic oligonucleotide: TRBC-972
ggguagagcaggugaguggggcc

SEQ ID NO: 50954 - RNA, 24 nt, Artificial Sequence
  Synthetic oligonucleotide: TRBC-973
gggguagagcaggugaguggggcc

SEQ ID NO: 50955 - RNA, 18 nt, Artificial Sequence
  Synthetic oligonucleotide: TRBC-974
ggggccuggggagaugcc

SEQ ID NO: 50956 - RNA, 19 nt, Artificial Sequence
  Synthetic oligonucleotide: TRBC-975
uggggccuggggagaugcc

SEQ ID NO: 50957 - RNA, 20 nt, Artificial Sequence
  Synthetic oligonucleotide: TRBC-219
guggggccuggggagaugcc

SEQ ID NO: 50958 - RNA, 21 nt, Artificial Sequence
  Synthetic oligonucleotide: TRBC-976
aguggggccuggggagaugcc

SEQ ID NO: 50959 - RNA, 22 nt, Artificial Sequence
  Synthetic oligonucleotide: TRBC-977
gaguggggccuggggagaugcc

SEQ ID NO: 50960 - RNA, 23 nt, Artificial Sequence
  Synthetic oligonucleotide: TRBC-978
ugaguggggccuggggagaugcc

SEQ ID NO: 50961 - RNA, 24 nt, Artificial Sequence
  Synthetic oligonucleotide: TRBC-979
gugaguggggccuggggagaugcc

SEQ ID NO: 50962 - RNA, 18 nt, Artificial Sequence
  Synthetic oligonucleotide: TRBC-980
caacagagucuuaccagc

SEQ ID NO: 50963 - RNA, 19 nt, Artificial Sequence
  Synthetic oligonucleotide: TRBC-981
ucaacagagucuuaccagc

SEQ ID NO: 50964 - RNA, 20 nt, Artificial Sequence
  Synthetic oligonucleotide: TRBC-982
gucaacagagucuuaccagc

SEQ ID NO: 50965 - RNA, 21 nt, Artificial Sequence
  Synthetic oligonucleotide: TRBC-983
ugucaacagagucuuaccagc

SEQ ID NO: 50966 - RNA, 22 nt, Artificial Sequence
  Synthetic oligonucleotide: TRBC-984
uugucaacagagucuuaccagc

SEQ ID NO: 50967 - RNA, 23 nt, Artificial Sequence
  Synthetic oligonucleotide: TRBC-985
cuugucaacagagucuuaccagc

SEQ ID NO: 50968 - RNA, 24 nt, Artificial Sequence
  Synthetic oligonucleotide: TRBC-986
ucuugucaacagagucuuaccagc

SEQ ID NO: 50969 - RNA, 18 nt, Artificial Sequence
  Synthetic oligonucleotide: TRBC-987
uacugccugagcagccgc

SEQ ID NO: 50970 - RNA, 19 nt, Artificial Sequence
  Synthetic oligonucleotide: TRBC-988
auacugccugagcagccgc

SEQ ID NO: 50971 - RNA, 20 nt, Artificial Sequence
  Synthetic oligonucleotide: TRBC-989
gauacugccugagcagccgc

SEQ ID NO: 50972 - RNA, 21 nt, Artificial Sequence
  Synthetic oligonucleotide: TRBC-990
agauacugccugagcagccgc

SEQ ID NO: 50973 - RNA, 22 nt, Artificial Sequence
  Synthetic oligonucleotide: TRBC-991
cagauacugccugagcagccgc

SEQ ID NO: 50974 - RNA, 23 nt, Artificial Sequence
  Synthetic oligonucleotide: TRBC-992
ccagauacugccugagcagccgc

SEQ ID NO: 50975 - RNA, 24 nt, Artificial Sequence
  Synthetic oligonucleotide: TRBC-993
uccagauacugccugagcagccgc

SEQ ID NO: 50976 - RNA, 18 nt, Artificial Sequence
  Synthetic oligonucleotide: TRBC-994
gaucgucagcgccgaggc

SEQ ID NO: 50977 - RNA, 19 nt, Artificial Sequence
  Synthetic oligonucleotide: TRBC-995
agaucgucagcgccgaggc

SEQ ID NO: 50978 - RNA, 20 nt, Artificial Sequence
  Synthetic oligonucleotide: TRBC-996
cagaucgucagcgccgaggc

SEQ ID NO: 50979 - RNA, 21 nt, Artificial Sequence
  Synthetic oligonucleotide: TRBC-997
ccagaucgucagcgccgaggc

SEQ ID NO: 50980 - RNA, 22 nt, Artificial Sequence
  Synthetic oligonucleotide: TRBC-998
cccagaucgucagcgccgaggc

SEQ ID NO: 50981 - RNA, 23 nt, Artificial Sequence
  Synthetic oligonucleotide: TRBC-999
acccagaucgucagcgccgaggc

SEQ ID NO: 50982 - RNA, 24 nt, Artificial Sequence
  Synthetic oligonucleotide: TRBC-1000
cacccagaucgucagcgccgaggc

SEQ ID NO: 50983 - RNA, 18 nt, Artificial Sequence
  Synthetic oligonucleotide: TRBC-1001
agagcaggugaguggggc

SEQ ID NO: 50984 - RNA, 19 nt, Artificial Sequence
  Synthetic oligonucleotide: TRBC-1002
uagagcaggugaguggggc

SEQ ID NO: 50985 - RNA, 20 nt, Artificial Sequence
  Synthetic oligonucleotide: TRBC-1003
guagagcaggugaguggggc

SEQ ID NO: 50986 - RNA, 21 nt, Artificial Sequence
  Synthetic oligonucleotide: TRBC-1004
gguagagcaggugaguggggc

SEQ ID NO: 50987 - RNA, 22 nt, Artificial Sequence
  Synthetic oligonucleotide: TRBC-1005
ggguagagcaggugaguggggc

SEQ ID NO: 50988 - RNA, 23 nt, Artificial Sequence
  Synthetic oligonucleotide: TRBC-1006
gggguagagcaggugaguggggc

SEQ ID NO: 50989 - RNA, 24 nt, Artificial Sequence
  Synthetic oligonucleotide: TRBC-1007
ugggguagagcaggugaguggggc

SEQ ID NO: 50990 - RNA, 18 nt, Artificial Sequence
  Synthetic oligonucleotide: TRBC-1008
uggggccuggggagaugc

SEQ ID NO: 50991 - RNA, 19 nt, Artificial Sequence
  Synthetic oligonucleotide: TRBC-1009
guggggccuggggagaugc

SEQ ID NO: 50992 - RNA, 20 nt, Artificial Sequence
  Synthetic oligonucleotide: TRBC-1010
aguggggccuggggagaugc

SEQ ID NO: 50993 - RNA, 21 nt, Artificial Sequence
  Synthetic oligonucleotide: TRBC-1011
gaguggggccuggggagaugc

SEQ ID NO: 50994 - RNA, 22 nt, Artificial Sequence
  Synthetic oligonucleotide: TRBC-1012
ugaguggggccuggggagaugc

SEQ ID NO: 50995 - RNA, 23 nt, Artificial Sequence
  Synthetic oligonucleotide: TRBC-1013
gugaguggggccuggggagaugc

SEQ ID NO: 50996 - RNA, 24 nt, Artificial Sequence
  Synthetic oligonucleotide: TRBC-1014
ggugaguggggccuggggagaugc

SEQ ID NO: 50997 - RNA, 18 nt, Artificial Sequence
  Synthetic oligonucleotide: TRBC-1015
aaugacuccagauacugc

SEQ ID NO: 50998 - RNA, 19 nt, Artificial Sequence
  Synthetic oligonucleotide: TRBC-1016
caaugacuccagauacugc

SEQ ID NO: 50999 - RNA, 20 nt, Artificial Sequence
  Synthetic oligonucleotide: TRBC-1017
ucaaugacuccagauacugc

SEQ ID NO: 51000 - RNA, 21 nt, Artificial Sequence
  Synthetic oligonucleotide: TRBC-1018
cucaaugacuccagauacugc

SEQ ID NO: 51001 - RNA, 22 nt, Artificial Sequence
  Synthetic oligonucleotide: TRBC-1019
ccucaaugacuccagauacugc

SEQ ID NO: 51002 - RNA, 23 nt, Artificial Sequence
  Synthetic oligonucleotide: TRBC-1020
cccucaaugacuccagauacugc

SEQ ID NO: 51003 - RNA, 24 nt, Artificial Sequence
  Synthetic oligonucleotide: TRBC-1021
gcccucaaugacuccagauacugc

SEQ ID NO: 51004 - RNA, 18 nt, Artificial Sequence
  Synthetic oligonucleotide: TRBC-1022
uccucuaugagaucuugc

SEQ ID NO: 51005 - RNA, 19 nt, Artificial Sequence
  Synthetic oligonucleotide: TRBC-1023
auccucuaugagaucuugc

SEQ ID NO: 51006 - RNA, 20 nt, Artificial Sequence
  Synthetic oligonucleotide: TRBC-1024
cauccucuaugagaucuugc

SEQ ID NO: 51007 - RNA, 21 nt, Artificial Sequence
  Synthetic oligonucleotide: TRBC-1025
ccauccucuaugagaucuugc

SEQ ID NO: 51008 - RNA, 22 nt, Artificial Sequence
  Synthetic oligonucleotide: TRBC-1026
accauccucuaugagaucuugc

SEQ ID NO: 51009 - RNA, 23 nt, Artificial Sequence
  Synthetic oligonucleotide: TRBC-1027
caccauccucuaugagaucuugc

SEQ ID NO: 51010 - RNA, 24 nt, Artificial Sequence
  Synthetic oligonucleotide: TRBC-1028
ccaccauccucuaugagaucuugc

SEQ ID NO: 51011 - RNA, 18 nt, Artificial Sequence
  Synthetic oligonucleotide: TRBC-1029
acagacccgcagccccuc

SEQ ID NO: 51012 - RNA, 19 nt, Artificial Sequence
  Synthetic oligonucleotide: TRBC-1030
cacagacccgcagccccuc

SEQ ID NO: 51013 - RNA, 20 nt, Artificial Sequence
  Synthetic oligonucleotide: TRBC-1031
gcacagacccgcagccccuc

SEQ ID NO: 51014 - RNA, 21 nt, Artificial Sequence
  Synthetic oligonucleotide: TRBC-1032
agcacagacccgcagccccuc

SEQ ID NO: 51015 - RNA, 22 nt, Artificial Sequence
  Synthetic oligonucleotide: TRBC-1033
cagcacagacccgcagccccuc

SEQ ID NO: 51016 - RNA, 23 nt, Artificial Sequence
  Synthetic oligonucleotide: TRBC-1034
ucagcacagacccgcagccccuc

SEQ ID NO: 51017 - RNA, 24 nt, Artificial Sequence
  Synthetic oligonucleotide: TRBC-1035
gucagcacagacccgcagccccuc

SEQ ID NO: 51018 - RNA, 18 nt, Artificial Sequence
  Synthetic oligonucleotide: TRBC-1036
guccaguucuacgggcuc

SEQ ID NO: 51019 - RNA, 19 nt, Artificial Sequence
  Synthetic oligonucleotide: TRBC-1037
aguccaguucuacgggcuc

SEQ ID NO: 51020 - RNA, 20 nt, Artificial Sequence
  Synthetic oligonucleotide: TRBC-1038
aaguccaguucuacgggcuc

SEQ ID NO: 51021 - RNA, 21 nt, Artificial Sequence
  Synthetic oligonucleotide: TRBC-1039
caaguccaguucuacgggcuc

SEQ ID NO: 51022 - RNA, 22 nt, Artificial Sequence
  Synthetic oligonucleotide: TRBC-1040
ucaaguccaguucuacgggcuc

SEQ ID NO: 51023 - RNA, 23 nt, Artificial Sequence
  Synthetic oligonucleotide: TRBC-1041
gucaaguccaguucuacgggcuc

SEQ ID NO: 51024 - RNA, 24 nt, Artificial Sequence
  Synthetic oligonucleotide: TRBC-1042
ugucaaguccaguucuacgggcuc

SEQ ID NO: 51025 - RNA, 18 nt, Artificial Sequence
  Synthetic oligonucleotide: TRBC-1043
uucucucuuccacagguc

SEQ ID NO: 51026 - RNA, 19 nt, Artificial Sequence
  Synthetic oligonucleotide: TRBC-1044
guucucucuuccacagguc

SEQ ID NO: 51027 - RNA, 20 nt, Artificial Sequence
  Synthetic oligonucleotide: TRBC-1045
uguucucucuuccacagguc

SEQ ID NO: 51028 - RNA, 21 nt, Artificial Sequence
  Synthetic oligonucleotide: TRBC-1046
auguucucucuuccacagguc

SEQ ID NO: 51029 - RNA, 22 nt, Artificial Sequence
  Synthetic oligonucleotide: TRBC-1047
aauguucucucuuccacagguc

SEQ ID NO: 51030 - RNA, 23 nt, Artificial Sequence
  Synthetic oligonucleotide: TRBC-1048
aaauguucucucuuccacagguc

SEQ ID NO: 51031 - RNA, 24 nt, Artificial Sequence
  Synthetic oligonucleotide: TRBC-1049
aaaauguucucucuuccacagguc

SEQ ID NO: 51032 - RNA, 18 nt, Artificial Sequence
  Synthetic oligonucleotide: TRBC-1050
ggucaagagaaaggauuc

SEQ ID NO: 51033 - RNA, 19 nt, Artificial Sequence
  Synthetic oligonucleotide: TRBC-1051
aggucaagagaaaggauuc

SEQ ID NO: 51034 - RNA, 20 nt, Artificial Sequence
  Synthetic oligonucleotide: TRBC-1052
caggucaagagaaaggauuc

SEQ ID NO: 51035 - RNA, 21 nt, Artificial Sequence
  Synthetic oligonucleotide: TRBC-1053
acaggucaagagaaaggauuc

SEQ ID NO: 51036 - RNA, 22 nt, Artificial Sequence
  Synthetic oligonucleotide: TRBC-1054
cacaggucaagagaaaggauuc

SEQ ID NO: 51037 - RNA, 23 nt, Artificial Sequence
  Synthetic oligonucleotide: TRBC-1055
ccacaggucaagagaaaggauuc

SEQ ID NO: 51038 - RNA, 24 nt, Artificial Sequence
  Synthetic oligonucleotide: TRBC-1056
uccacaggucaagagaaaggauuc

SEQ ID NO: 51039 - RNA, 18 nt, Artificial Sequence
  Synthetic oligonucleotide: TRBC-1057
cauuaccucuucccuuuc

SEQ ID NO: 51040 - RNA, 19 nt, Artificial Sequence
  Synthetic oligonucleotide: TRBC-1058
ccauuaccucuucccuuuc

SEQ ID NO: 51041 - RNA, 20 nt, Artificial Sequence
  Synthetic oligonucleotide: TRBC-1059
cccauuaccucuucccuuuc

SEQ ID NO: 51042 - RNA, 21 nt, Artificial Sequence
  Synthetic oligonucleotide: TRBC-1060
ccccauuaccucuucccuuuc

SEQ ID NO: 51043 - RNA, 22 nt, Artificial Sequence
  Synthetic oligonucleotide: TRBC-1061
gccccauuaccucuucccuuuc

SEQ ID NO: 51044 - RNA, 23 nt, Artificial Sequence
  Synthetic oligonucleotide: TRBC-1062
agccccauuaccucuucccuuuc

SEQ ID NO: 51045 - RNA, 24 nt, Artificial Sequence
  Synthetic oligonucleotide: TRBC-1063
uagccccauuaccucuucccuuuc

SEQ ID NO: 51046 - RNA, 18 nt, Artificial Sequence
  Synthetic oligonucleotide: TRBC-1064
uguuugagccaucagaag

SEQ ID NO: 51047 - RNA, 19 nt, Artificial Sequence
  Synthetic oligonucleotide: TRBC-1065
guguuugagccaucagaag

SEQ ID NO: 51048 - RNA, 20 nt, Artificial Sequence
  Synthetic oligonucleotide: TRBC-1066
uguguuugagccaucagaag

SEQ ID NO: 51049 - RNA, 21 nt, Artificial Sequence
  Synthetic oligonucleotide: TRBC-1067
cuguguuugagccaucagaag

SEQ ID NO: 51050 - RNA, 22 nt, Artificial Sequence
  Synthetic oligonucleotide: TRBC-1068
gcuguguuugagccaucagaag

SEQ ID NO: 51051 - RNA, 23 nt, Artificial Sequence
  Synthetic oligonucleotide: TRBC-1069
cgcuguguuugagccaucagaag

SEQ ID NO: 51052 - RNA, 24 nt, Artificial Sequence
  Synthetic oligonucleotide: TRBC-1070
ucgcuguguuugagccaucagaag

SEQ ID NO: 51053 - RNA, 18 nt, Artificial Sequence
  Synthetic oligonucleotide: TRBC-1071
gcugauggccaugguaag

SEQ ID NO: 51054 - RNA, 19 nt, Artificial Sequence
  Synthetic oligonucleotide: TRBC-1072
ugcugauggccaugguaag

SEQ ID NO: 51055 - RNA, 20 nt, Artificial Sequence
  Synthetic oligonucleotide: TRBC-1073
gugcugauggccaugguaag

SEQ ID NO: 51056 - RNA, 21 nt, Artificial Sequence
  Synthetic oligonucleotide: TRBC-1074
cgugcugauggccaugguaag

SEQ ID NO: 51057 - RNA, 22 nt, Artificial Sequence
  Synthetic oligonucleotide: TRBC-1075
ucgugcugauggccaugguaag

SEQ ID NO: 51058 - RNA, 23 nt, Artificial Sequence
  Synthetic oligonucleotide: TRBC-1076
cucgugcugauggccaugguaag

SEQ ID NO: 51059 - RNA, 24 nt, Artificial Sequence
  Synthetic oligonucleotide: TRBC-1077
ccucgugcugauggccaugguaag

SEQ ID NO: 51060 - RNA, 18 nt, Artificial Sequence
  Synthetic oligonucleotide: TRBC-1078
uaccccgaccacguggag

SEQ ID NO: 51061 - RNA, 19 nt, Artificial Sequence
  Synthetic oligonucleotide: TRBC-1079
cuaccccgaccacguggag

SEQ ID NO: 51062 - RNA, 20 nt, Artificial Sequence
  Synthetic oligonucleotide: TRBC-1080
ucuaccccgaccacguggag

SEQ ID NO: 51063 - RNA, 21 nt, Artificial Sequence
  Synthetic oligonucleotide: TRBC-1081
uucuaccccgaccacguggag

SEQ ID NO: 51064 - RNA, 22 nt, Artificial Sequence
  Synthetic oligonucleotide: TRBC-1082
cuucuaccccgaccacguggag

SEQ ID NO: 51065 - RNA, 23 nt, Artificial Sequence
  Synthetic oligonucleotide: TRBC-1083
gcuucuaccccgaccacguggag

SEQ ID NO: 51066 - RNA, 24 nt, Artificial Sequence
  Synthetic oligonucleotide: TRBC-1084
ggcuucuaccccgaccacguggag

SEQ ID NO: 51067 - RNA, 18 nt, Artificial Sequence
  Synthetic oligonucleotide: TRBC-1085
ugggguagagcaggugag

SEQ ID NO: 51068 - RNA, 19 nt, Artificial Sequence
  Synthetic oligonucleotide: TRBC-1086
cugggguagagcaggugag

SEQ ID NO: 51069 - RNA, 20 nt, Artificial Sequence
  Synthetic oligonucleotide: TRBC-243
ccugggguagagcaggugag

SEQ ID NO: 51070 - RNA, 21 nt, Artificial Sequence
  Synthetic oligonucleotide: TRBC-1087
gccugggguagagcaggugag

SEQ ID NO: 51071 - RNA, 22 nt, Artificial Sequence
  Synthetic oligonucleotide: TRBC-1088
ggccugggguagagcaggugag

SEQ ID NO: 51072 - RNA, 23 nt, Artificial Sequence
  Synthetic oligonucleotide: TRBC-1089
aggccugggguagagcaggugag

SEQ ID NO: 51073 - RNA, 24 nt, Artificial Sequence
  Synthetic oligonucleotide: TRBC-1090
gaggccugggguagagcaggugag

SEQ ID NO: 51074 - RNA, 18 nt, Artificial Sequence
  Synthetic oligonucleotide: TRBC-1091
gcuucuaccccgaccacg

SEQ ID NO: 51075 - RNA, 19 nt, Artificial Sequence
  Synthetic oligonucleotide: TRBC-1092
ggcuucuaccccgaccacg

SEQ ID NO: 51076 - RNA, 20 nt, Artificial Sequence
  Synthetic oligonucleotide: TRBC-38
aggcuucuaccccgaccacg

SEQ ID NO: 51077 - RNA, 21 nt, Artificial Sequence
  Synthetic oligonucleotide: TRBC-1093
caggcuucuaccccgaccacg

SEQ ID NO: 51078 - RNA, 22 nt, Artificial Sequence
  Synthetic oligonucleotide: TRBC-1094
acaggcuucuaccccgaccacg

SEQ ID NO: 51079 - RNA, 23 nt, Artificial Sequence
  Synthetic oligonucleotide: TRBC-1095
cacaggcuucuaccccgaccacg

SEQ ID NO: 51080 - RNA, 24 nt, Artificial Sequence
  Synthetic oligonucleotide: TRBC-1096
ccacaggcuucuaccccgaccacg

SEQ ID NO: 51081 - RNA, 18 nt, Artificial Sequence
  Synthetic oligonucleotide: TRBC-1097
ucacccagaucgucagcg

SEQ ID NO: 51082 - RNA, 19 nt, Artificial Sequence
  Synthetic oligonucleotide: TRBC-1098
gucacccagaucgucagcg

SEQ ID NO: 51083 - RNA, 20 nt, Artificial Sequence
  Synthetic oligonucleotide: TRBC-1099
ugucacccagaucgucagcg

SEQ ID NO: 51084 - RNA, 21 nt, Artificial Sequence
  Synthetic oligonucleotide: TRBC-1100
cugucacccagaucgucagcg

SEQ ID NO: 51085 - RNA, 22 nt, Artificial Sequence
  Synthetic oligonucleotide: TRBC-1101
ccugucacccagaucgucagcg

SEQ ID NO: 51086 - RNA, 23 nt, Artificial Sequence
  Synthetic oligonucleotide: TRBC-1102
accugucacccagaucgucagcg

SEQ ID NO: 51087 - RNA, 24 nt, Artificial Sequence
  Synthetic oligonucleotide: TRBC-1103
aaccugucacccagaucgucagcg

SEQ ID NO: 51088 - RNA, 18 nt, Artificial Sequence
  Synthetic oligonucleotide: TRBC-1104
cugauggccaugguaagg

SEQ ID NO: 51089 - RNA, 19 nt, Artificial Sequence
  Synthetic oligonucleotide: TRBC-1105
gcugauggccaugguaagg

SEQ ID NO: 51090 - RNA, 20 nt, Artificial Sequence
  Synthetic oligonucleotide: TRBC-248
ugcugauggccaugguaagg

SEQ ID NO: 51091 - RNA, 21 nt, Artificial Sequence
  Synthetic oligonucleotide: TRBC-1106
gugcugauggccaugguaagg

SEQ ID NO: 51092 - RNA, 22 nt, Artificial Sequence
  Synthetic oligonucleotide: TRBC-1107
cgugcugauggccaugguaagg

SEQ ID NO: 51093 - RNA, 23 nt, Artificial Sequence
  Synthetic oligonucleotide: TRBC-1108
ucgugcugauggccaugguaagg

SEQ ID NO: 51094 - RNA, 24 nt, Artificial Sequence
  Synthetic oligonucleotide: TRBC-1109
cucgugcugauggccaugguaagg

SEQ ID NO: 51095 - RNA, 18 nt, Artificial Sequence
  Synthetic oligonucleotide: TRBC-1110
gccaugguaaggaggagg

SEQ ID NO: 51096 - RNA, 19 nt, Artificial Sequence
  Synthetic oligonucleotide: TRBC-1111
ggccaugguaaggaggagg

SEQ ID NO: 51097 - RNA, 20 nt, Artificial Sequence
  Synthetic oligonucleotide: TRBC-1112
uggccaugguaaggaggagg

SEQ ID NO: 51098 - RNA, 21 nt, Artificial Sequence
  Synthetic oligonucleotide: TRBC-1113
auggccaugguaaggaggagg

SEQ ID NO: 51099 - RNA, 22 nt, Artificial Sequence
  Synthetic oligonucleotide: TRBC-1114
gauggccaugguaaggaggagg

SEQ ID NO: 51100 - RNA, 23 nt, Artificial Sequence
  Synthetic oligonucleotide: TRBC-1115
ugauggccaugguaaggaggagg

SEQ ID NO: 51101 - RNA, 24 nt, Artificial Sequence
  Synthetic oligonucleotide: TRBC-1116
cugauggccaugguaaggaggagg

SEQ ID NO: 51102 - RNA, 18 nt, Artificial Sequence
  Synthetic oligonucleotide: TRBC-1117
cagcgccgaggccugggg

SEQ ID NO: 51103 - RNA, 19 nt, Artificial Sequence
  Synthetic oligonucleotide: TRBC-1118
ucagcgccgaggccugggg

SEQ ID NO: 51104 - RNA, 20 nt, Artificial Sequence
  Synthetic oligonucleotide: TRBC-1119
gucagcgccgaggccugggg

SEQ ID NO: 51105 - RNA, 21 nt, Artificial Sequence
  Synthetic oligonucleotide: TRBC-1120
cgucagcgccgaggccugggg

SEQ ID NO: 51106 - RNA, 22 nt, Artificial Sequence
  Synthetic oligonucleotide: TRBC-1121
ucgucagcgccgaggccugggg

SEQ ID NO: 51107 - RNA, 23 nt, Artificial Sequence
  Synthetic oligonucleotide: TRBC-1122
aucgucagcgccgaggccugggg

SEQ ID NO: 51108 - RNA, 24 nt, Artificial Sequence
  Synthetic oligonucleotide: TRBC-1123
gaucgucagcgccgaggccugggg

SEQ ID NO: 51109 - RNA, 18 nt, Artificial Sequence
  Synthetic oligonucleotide: TRBC-1124
agcuggugggugaauggg

SEQ ID NO: 51110 - RNA, 19 nt, Artificial Sequence
  Synthetic oligonucleotide: TRBC-1125
gagcuggugggugaauggg

SEQ ID NO: 51111 - RNA, 20 nt, Artificial Sequence
  Synthetic oligonucleotide: TRBC-1126
ugagcuggugggugaauggg

SEQ ID NO: 51112 - RNA, 21 nt, Artificial Sequence
  Synthetic oligonucleotide: TRBC-1127
cugagcuggugggugaauggg

SEQ ID NO: 51113 - RNA, 22 nt, Artificial Sequence
  Synthetic oligonucleotide: TRBC-1128
gcugagcuggugggugaauggg

SEQ ID NO: 51114 - RNA, 23 nt, Artificial Sequence
  Synthetic oligonucleotide: TRBC-1129
agcugagcuggugggugaauggg

SEQ ID NO: 51115 - RNA, 24 nt, Artificial Sequence
  Synthetic oligonucleotide: TRBC-1130
gagcugagcuggugggugaauggg

SEQ ID NO: 51116 - RNA, 18 nt, Artificial Sequence
  Synthetic oligonucleotide: TRBC-1131
gucucggccaccuucugg

SEQ ID NO: 51117 - RNA, 19 nt, Artificial Sequence
  Synthetic oligonucleotide: TRBC-1132
ggucucggccaccuucugg

SEQ ID NO: 51118 - RNA, 20 nt, Artificial Sequence
  Synthetic oligonucleotide: TRBC-1133
gggucucggccaccuucugg

SEQ ID NO: 51119 - RNA, 21 nt, Artificial Sequence
  Synthetic oligonucleotide: TRBC-1134
agggucucggccaccuucugg

SEQ ID NO: 51120 - RNA, 22 nt, Artificial Sequence
  Synthetic oligonucleotide: TRBC-1135
gagggucucggccaccuucugg

SEQ ID NO: 51121 - RNA, 23 nt, Artificial Sequence
  Synthetic oligonucleotide: TRBC-1136
ugagggucucggccaccuucugg

SEQ ID NO: 51122 - RNA, 24 nt, Artificial Sequence
  Synthetic oligonucleotide: TRBC-1137
cugagggucucggccaccuucugg

SEQ ID NO: 51123 - RNA, 18 nt, Artificial Sequence
  Synthetic oligonucleotide: TRBC-1138
gcaggugaguggggccug

SEQ ID NO: 51124 - RNA, 19 nt, Artificial Sequence
  Synthetic oligonucleotide: TRBC-1139
agcaggugaguggggccug

SEQ ID NO: 51125 - RNA, 20 nt, Artificial Sequence
  Synthetic oligonucleotide: TRBC-261
gagcaggugaguggggccug

SEQ ID NO: 51126 - RNA, 21 nt, Artificial Sequence
  Synthetic oligonucleotide: TRBC-1140
agagcaggugaguggggccug

SEQ ID NO: 51127 - RNA, 22 nt, Artificial Sequence
  Synthetic oligonucleotide: TRBC-1141
uagagcaggugaguggggccug

SEQ ID NO: 51128 - RNA, 23 nt, Artificial Sequence
  Synthetic oligonucleotide: TRBC-1142
guagagcaggugaguggggccug

SEQ ID NO: 51129 - RNA, 24 nt, Artificial Sequence
  Synthetic oligonucleotide: TRBC-1143
gguagagcaggugaguggggccug

SEQ ID NO: 51130 - RNA, 18 nt, Artificial Sequence
  Synthetic oligonucleotide: TRBC-1144
cugagcuggugggugaau

SEQ ID NO: 51131 - RNA, 19 nt, Artificial Sequence
  Synthetic oligonucleotide: TRBC-1145
gcugagcuggugggugaau

SEQ ID NO: 51132 - RNA, 20 nt, Artificial Sequence
  Synthetic oligonucleotide: TRBC-269
agcugagcuggugggugaau

SEQ ID NO: 51133 - RNA, 21 nt, Artificial Sequence
  Synthetic oligonucleotide: TRBC-1146
gagcugagcuggugggugaau

SEQ ID NO: 51134 - RNA, 22 nt, Artificial Sequence
  Synthetic oligonucleotide: TRBC-1147
ggagcugagcuggugggugaau

SEQ ID NO: 51135 - RNA, 23 nt, Artificial Sequence
  Synthetic oligonucleotide: TRBC-1148
uggagcugagcuggugggugaau

SEQ ID NO: 51136 - RNA, 24 nt, Artificial Sequence
  Synthetic oligonucleotide: TRBC-1149
guggagcugagcuggugggugaau

SEQ ID NO: 51137 - RNA, 18 nt, Artificial Sequence
  Synthetic oligonucleotide: TRBC-1150
ucgcuguguuugagccau

SEQ ID NO: 51138 - RNA, 19 nt, Artificial Sequence
  Synthetic oligonucleotide: TRBC-1151
gucgcuguguuugagccau

SEQ ID NO: 51139 - RNA, 20 nt, Artificial Sequence
  Synthetic oligonucleotide: TRBC-1152
ggucgcuguguuugagccau

SEQ ID NO: 51140 - RNA, 21 nt, Artificial Sequence
  Synthetic oligonucleotide: TRBC-1153
aggucgcuguguuugagccau

SEQ ID NO: 51141 - RNA, 22 nt, Artificial Sequence
  Synthetic oligonucleotide: TRBC-1154
gaggucgcuguguuugagccau

SEQ ID NO: 51142 - RNA, 23 nt, Artificial Sequence
  Synthetic oligonucleotide: TRBC-1155
cgaggucgcuguguuugagccau

SEQ ID NO: 51143 - RNA, 24 nt, Artificial Sequence
  Synthetic oligonucleotide: TRBC-1156
ccgaggucgcuguguuugagccau

SEQ ID NO: 51144 - RNA, 18 nt, Artificial Sequence
  Synthetic oligonucleotide: TRBC-1157
agcaggugaguggggccu

SEQ ID NO: 51145 - RNA, 19 nt, Artificial Sequence
  Synthetic oligonucleotide: TRBC-1158
gagcaggugaguggggccu

SEQ ID NO: 51146 - RNA, 20 nt, Artificial Sequence
  Synthetic oligonucleotide: TRBC-275
agagcaggugaguggggccu

SEQ ID NO: 51147 - RNA, 21 nt, Artificial Sequence
  Synthetic oligonucleotide: TRBC-1159
uagagcaggugaguggggccu

SEQ ID NO: 51148 - RNA, 22 nt, Artificial Sequence
  Synthetic oligonucleotide: TRBC-1160
guagagcaggugaguggggccu

SEQ ID NO: 51149 - RNA, 23 nt, Artificial Sequence
  Synthetic oligonucleotide: TRBC-1161
gguagagcaggugaguggggccu

SEQ ID NO: 51150 - RNA, 24 nt, Artificial Sequence
  Synthetic oligonucleotide: TRBC-1162
ggguagagcaggugaguggggccu

SEQ ID NO: 51151 - RNA, 18 nt, Artificial Sequence
  Synthetic oligonucleotide: TRBC-1163
ccucuaugagaucuugcu

SEQ ID NO: 51152 - RNA, 19 nt, Artificial Sequence
  Synthetic oligonucleotide: TRBC-1164
uccucuaugagaucuugcu

SEQ ID NO: 51153 - RNA, 20 nt, Artificial Sequence
  Synthetic oligonucleotide: TRBC-278
auccucuaugagaucuugcu

SEQ ID NO: 51154 - RNA, 21 nt, Artificial Sequence
  Synthetic oligonucleotide: TRBC-1165
cauccucuaugagaucuugcu

SEQ ID NO: 51155 - RNA, 22 nt, Artificial Sequence
  Synthetic oligonucleotide: TRBC-1166
ccauccucuaugagaucuugcu

SEQ ID NO: 51156 - RNA, 23 nt, Artificial Sequence
  Synthetic oligonucleotide: TRBC-1167
accauccucuaugagaucuugcu

SEQ ID NO: 51157 - RNA, 24 nt, Artificial Sequence
  Synthetic oligonucleotide: TRBC-1168
caccauccucuaugagaucuugcu

SEQ ID NO: 51158 - RNA, 18 nt, Artificial Sequence
  Synthetic oligonucleotide: TRBC-1169
ugucugccaccauccucu

SEQ ID NO: 51159 - RNA, 19 nt, Artificial Sequence
  Synthetic oligonucleotide: TRBC-1170
cugucugccaccauccucu

SEQ ID NO: 51160 - RNA, 20 nt, Artificial Sequence
  Synthetic oligonucleotide: TRBC-1171
ccugucugccaccauccucu

SEQ ID NO: 51161 - RNA, 21 nt, Artificial Sequence
  Synthetic oligonucleotide: TRBC-1172
uccugucugccaccauccucu

SEQ ID NO: 51162 - RNA, 22 nt, Artificial Sequence
  Synthetic oligonucleotide: TRBC-1173
guccugucugccaccauccucu

SEQ ID NO: 51163 - RNA, 23 nt, Artificial Sequence
  Synthetic oligonucleotide: TRBC-1174
gguccugucugccaccauccucu

SEQ ID NO: 51164 - RNA, 24 nt, Artificial Sequence
  Synthetic oligonucleotide: TRBC-1175
ggguccugucugccaccauccucu

SEQ ID NO: 51165 - RNA, 18 nt, Artificial Sequence
  Synthetic oligonucleotide: TRBC-1176
uccaguucuacgggcucu

SEQ ID NO: 51166 - RNA, 19 nt, Artificial Sequence
  Synthetic oligonucleotide: TRBC-1177
guccaguucuacgggcucu

SEQ ID NO: 51167 - RNA, 20 nt, Artificial Sequence
  Synthetic oligonucleotide: TRBC-51
aguccaguucuacgggcucu

SEQ ID NO: 51168 - RNA, 21 nt, Artificial Sequence
  Synthetic oligonucleotide: TRBC-1178
aaguccaguucuacgggcucu

SEQ ID NO: 51169 - RNA, 22 nt, Artificial Sequence
  Synthetic oligonucleotide: TRBC-1179
caaguccaguucuacgggcucu

SEQ ID NO: 51170 - RNA, 23 nt, Artificial Sequence
  Synthetic oligonucleotide: TRBC-1180
ucaaguccaguucuacgggcucu

SEQ ID NO: 51171 - RNA, 24 nt, Artificial Sequence
  Synthetic oligonucleotide: TRBC-1181
gucaaguccaguucuacgggcucu

SEQ ID NO: 51172 - RNA, 18 nt, Artificial Sequence
  Synthetic oligonucleotide: TRBC-1182
gcugucaaguccaguucu

SEQ ID NO: 51173 - RNA, 19 nt, Artificial Sequence
  Synthetic oligonucleotide: TRBC-1183
cgcugucaaguccaguucu

SEQ ID NO: 51174 - RNA, 20 nt, Artificial Sequence
  Synthetic oligonucleotide: TRBC-1184
ccgcugucaaguccaguucu

SEQ ID NO: 51175 - RNA, 21 nt, Artificial Sequence
  Synthetic oligonucleotide: TRBC-1185
uccgcugucaaguccaguucu

SEQ ID NO: 51176 - RNA, 22 nt, Artificial Sequence
  Synthetic oligonucleotide: TRBC-1186
uuccgcugucaaguccaguucu

SEQ ID NO: 51177 - RNA, 23 nt, Artificial Sequence
  Synthetic oligonucleotide: TRBC-1187
cuuccgcugucaaguccaguucu

SEQ ID NO: 51178 - RNA, 24 nt, Artificial Sequence
  Synthetic oligonucleotide: TRBC-1188
acuuccgcugucaaguccaguucu

SEQ ID NO: 51179 - RNA, 18 nt, Artificial Sequence
  Synthetic oligonucleotide: TRBC-1189
cgugcugauggccauggu

SEQ ID NO: 51180 - RNA, 19 nt, Artificial Sequence
  Synthetic oligonucleotide: TRBC-1190
ucgugcugauggccauggu

SEQ ID NO: 51181 - RNA, 20 nt, Artificial Sequence
  Synthetic oligonucleotide: TRBC-1191
cucgugcugauggccauggu

SEQ ID NO: 51182 - RNA, 21 nt, Artificial Sequence
  Synthetic oligonucleotide: TRBC-1192
ccucgugcugauggccauggu

SEQ ID NO: 51183 - RNA, 22 nt, Artificial Sequence
  Synthetic oligonucleotide: TRBC-1193
cccucgugcugauggccauggu

SEQ ID NO: 51184 - RNA, 23 nt, Artificial Sequence
  Synthetic oligonucleotide: TRBC-1194
gcccucgugcugauggccauggu

SEQ ID NO: 51185 - RNA, 24 nt, Artificial Sequence
  Synthetic oligonucleotide: TRBC-1195
ugcccucgugcugauggccauggu

SEQ ID NO: 51186 - RNA, 18 nt, Artificial Sequence
  Synthetic oligonucleotide: TRBC-1196
cacccgaggucgcugugu

SEQ ID NO: 51187 - RNA, 19 nt, Artificial Sequence
  Synthetic oligonucleotide: TRBC-1197
ccacccgaggucgcugugu

SEQ ID NO: 51188 - RNA, 20 nt, Artificial Sequence
  Synthetic oligonucleotide: TRBC-1198
cccacccgaggucgcugugu

SEQ ID NO: 51189 - RNA, 21 nt, Artificial Sequence
  Synthetic oligonucleotide: TRBC-1199
ucccacccgaggucgcugugu

SEQ ID NO: 51190 - RNA, 22 nt, Artificial Sequence
  Synthetic oligonucleotide: TRBC-1200
uucccacccgaggucgcugugu

SEQ ID NO: 51191 - RNA, 23 nt, Artificial Sequence
  Synthetic oligonucleotide: TRBC-1201
guucccacccgaggucgcugugu

SEQ ID NO: 51192 - RNA, 24 nt, Artificial Sequence
  Synthetic oligonucleotide: TRBC-1202
uguucccacccgaggucgcugugu

SEQ ID NO: 51193 - RNA, 17 nt, Artificial Sequence
  Synthetic oligonucleotide: TRBC-1203
ccuguuuucuuucagac

SEQ ID NO: 51194 - RNA, 17 nt, Artificial Sequence
  Synthetic oligonucleotide: TRBC-1204
cacuggugugccuggcc

SEQ ID NO: 51195 - RNA, 17 nt, Artificial Sequence
  Synthetic oligonucleotide: TRBC-1205
cuuccacaggucaagag

SEQ ID NO: 51196 - RNA, 20 nt, Artificial Sequence
  Synthetic oligonucleotide: TRBC-1206
ccacacuggugugccuggcc

SEQ ID NO: 51197 - RNA, 20 nt, Artificial Sequence
  Synthetic oligonucleotide: TRBC-1207
ucucuuccacaggucaagag

SEQ ID NO: 51198 - RNA, 20 nt, Artificial Sequence
  Synthetic oligonucleotide: TRBC-1208
gccuuuugggugugggagau

SEQ ID NO: 51199 - RNA, 17 nt, Artificial Sequence
  Synthetic oligonucleotide: TRBC-1209
uuuugggugugggagau

SEQ ID NO: 51200 - RNA, 20 nt, Artificial Sequence
  Synthetic oligonucleotide: TRBC-1210
uccccuguuuucuuucagac

SEQ ID NO: 51201 - RNA, 20 nt, Artificial Sequence
  Synthetic oligonucleotide: AAVS1
guccccuccaccccacagug

SEQ ID NO: 51202 - DNA, 19 bp, Artificial Sequence
  Synthetic oligonucleotide: T7 promoter
taatacgactcactatagg

SEQ ID NO: 51203 - DNA, 17 bp, Artificial Sequence
  Synthetic oligonucleotide: Modified T7 promoter
taatacgactcactata

SEQ ID NO: 51204 - DNA, 18 bp, Artificial Sequence
  Synthetic oligonucleotide: Modified T7 promoter
taatacgactcactatag

SEQ ID NO: 51205 - DNA, 18 bp, Artificial Sequence
  Synthetic oligonucleotide: 5' sense primer
gttttagagctagaaata

SEQ ID NO: 51206 - DNA, 37 bp, Artificial Sequence
  Synthetic oligonucleotide: 3' anti-sense primer
aaaagcaccgactcggtgccactttttcaagttgata

SEQ ID NO: 51207 - protein, 288 aa, Homo sapiens
  MISC_FEATURE: PD1 (Human)
MQIPQAPWPVVWAVLQLGWRPGWFLDSPDRPWNPPTFSPALLVVTEGDNATFTCSFSNTSESFVLNWYRMSPSNQTDKLAAFPEDRSQPGQDCRFRVTQLPNGRDFHMSVVRARRNDSGTYLCGAISLAPKAQIKESLRAELRVTERRAEVPTAHPSPSPRPAGQFQTLVVGVVGGLLGSLVLLVWVLAVICSRAARGTIGARRTGQPLKEDPSAVPVFSVDYGELDFQWREKTPEPPVPCVPEQTEYATIVFPSGMGTSSPARRGSADGPRSAQPLRPEDGHCSWPL

SEQ ID NO: 51208 - DNA, 2115 bp, Homo sapiens
  misc_feature: PD1 (Human)
agtttcccttccgctcacctccgcctgagcagtggagaaggcggcactctggtggggctgctccaggcatgcagatcccacaggcgccctggccagtcgtctgggcggtgctacaactgggctggcggccaggatggttcttagactccccagacaggccctggaacccccccaccttctccccagccctgctcgtggtgaccgaaggggacaacgccaccttcacctgcagcttctccaacacatcggagagcttcgtgctaaactggtaccgcatgagccccagcaaccagacggacaagctggccgccttccccgaggaccgcagccagcccggccaggactgccgcttccgtgtcacacaactgcccaacgggcgtgacttccacatgagcgtggtcagggcccggcgcaatgacagcggcacctacctctgtggggccatctccctggcccccaaggcgcagatcaaagagagcctgcgggcagagctcagggtgacagagagaagggcagaagtgcccacagcccaccccagcccctcacccaggccagccggccagttccaaaccctggtggttggtgtcgtgggcggcctgctgggcagcctggtgctgctagtctgggtcctggccgtcatctgctcccgggccgcacgagggacaataggagccaggcgcaccggccagcccctgaaggaggacccctcagccgtgcctgtgttctctgtggactatggggagctggatttccagtggcgagagaagaccccggagccccccgtgccctgtgtccctgagcagacggagtatgccaccattgtctttcctagcggaatgggcacctcatcccccgcccgcaggggctcagctgacggccctcggagtgcccagccactgaggcctgaggatggacactgctcttggcccctctgaccggcttccttggccaccagtgttctgcagaccctccaccatgagcccgggtcagcgcatttcctcaggagaagcaggcagggtgcaggccattgcaggccgtccaggggctgagctgcctgggggcgaccggggctccagcctgcacctgcaccaggcacagccccaccacaggactcatgtctcaatgcccacagtgagcccaggcagcaggtgtcaccgtcccctacagggagggccagatgcagtcactgcttcaggtcctgccagcacagagctgcctgcgtccagctccctgaatctctgctgctgctgctgctgctgctgctgctgcctgcggcccggggctgaaggcgccgtggccctgcctgacgccccggagcctcctgcctgaacttgggggctggttggagatggccttggagcagccaaggtgcccctggcagtggcatcccgaaacgccctggacgcagggcccaagactgggcacaggagtgggaggtacatggggctggggactccccaggagttatctgctccctgcaggcctagagaagtttcagggaaggtcagaagagctcctggctgtggtgggcagggcaggaaacccctccacctttacacatgcccaggcagcacctcaggccctttgtggggcagggaagctgaggcagtaagcgggcaggcagagctggaggcctttcaggcccagccagcactctggcctcctgccgccgcattccaccccagcccctcacaccactcgggagagggacatcctacggtcccaaggtcaggagggcagggctggggttgactcaggcccctcccagctgtggccacctgggtgttgggagggcagaagtgcaggcacctagggccccccatgtgcccaccctgggagctctccttggaacccattcctgaaattatttaaaggggttggccgggctcccaccagggcctgggtgggaaggtacaggcgttcccccggggcctagtacccccgccgtggcctatccactcctcacatccacacactgcacccccactcctggggcagggccaccagcatccaggcggccagcaggcacctgagtggctgggacaagggatcccccttccctgtggttctattatattataattataattaaatatgagagcatgctaaggaaaa

SEQ ID NO: 51209 - protein, 290 aa, Homo sapiens
MRIFAVFIFMTYWHLLNAFTVTVPKDLYVVEYGSNMTIECKFPVEKQLDLAALIVYWEMEDKNIIQFVHGEEDLKVQHSSYRQRARLLKDQLSLGNAALQITDVKLQDAGVYRCMISYGGADYKRITVKVNAPYNKINQRILVVDPVTSEHELTCQAEGYPKAEVIWTSSDHQVLSGKTTTTNSKREEKLFNVTSTLRINTTTNEIFYCTFRRLDPEENHTAELVIPELPLAHPPNERTHLVILGAILLCLGVALTFIFRLRKGRMMDVKKCGIQDTNSKKQSDTHLEET

SEQ ID NO: 51210 - DNA, 2671 bp, Homo sapiens
  misc_feature: PD-L1 (Human)
aacctgtggtttaggggttcatcggggctgagcgtgacaagaggaaggaatgggcccgtgggatgcaggcaatgtgggacttaaaaggcccaagcactgaaaatggaacctggcgaaagcagaggaggagaatgaagaaagatggagtcaaacagggagcctggagggagaccttgatactttcaaatgcctgaggggctcatcgacgcctgtgacagggagaaaggatacttctgaacaaggagcctccaagcaaatcatccattgctcatcctaggaagacgggttgagaatccctaatttgagggtcagttcctgcagaagtgccctttgcctccactcaatgcctcaatttgttttctgcatgactgagagtctcagtgttggaacgggacagtatttatgtatgagtttttcctatttattttgagtctgtgaggtcttcttgtcatgtgagtgtggttgtgaatgatttcttttgaagatatattgtagtagatgttacaattttgtcgccaaactaaacttgctgcttaatgatttgctcacatctagtaaaacatggagtatttgtaaggtgcttggtctcctctataactacaagtatacattggaagcataaagatcaaaccgttggttgcataggatgtcacctttatttaacccattaatactctggttgacctaatcttattctcagacctcaagtgtctgtgcagtatctgttccatttaaatatcagctttacaattatgtggtagcctacacacataatctcatttcatcgctgtaaccaccctgttgtgataaccactattattttacccatcgtacagctgaggaagcaaacagattaagtaacttgcccaaaccagtaaatagcagacctcagactgccacccactgtccttttataatacaatttacagctatattttactttaagcaattcttttattcaaaaaccatttattaagtgcccttgcaatatcaatcgctgtgccaggcattgaatctacagatgtgagcaagacaaagtacctgtcctcaaggagctcatagtataatgaggagattaacaagaaaatgtattattacaatttagtccagtgtcatagcataaggatgatgcgaggggaaaacccgagcagtgttgccaagaggaggaaataggccaatgtggtctgggacggttggatatacttaaacatcttaataatcagagtaattttcatttacaaagagaggtcggtacttaaaataaccctgaaaaataacactggaattccttttctagcattatatttattcctgatttgcctttgccatataatctaatgcttgtttatatagtgtctggtattgtttaacagttctgtcttttctatttaaatgccactaaattttaaattcatacctttccatgattcaaaattcaaaagatcccatgggagatggttggaaaatctccacttcatcctccaagccattcaagtttcctttccagaagcaactgctactgcctttcattcatatgttcttctaaagatagtctacatttggaaatgtatgttaaaagcacgtatttttaaaatttttttcctaaatagtaacacattgtatgtctgctgtgtactttgctatttttatttattttagtgtttcttatatagcagatggaatgaatttgaagttcccagggctgaggatccatgccttctttgtttctaagttatctttcccatagcttttcattatctttcatatgatccagtatatgttaaatatgtcctacatatacatttagacaaccaccatttgttaagtatttgctctaggacagagtttggatttgtttatgtttgctcaaaaggagacccatgggctctccagggtgcactgagtcaatctagtcctaaaaagcaatcttattattaactctgtatgacagaatcatgtctggaacttttgttttctgctttctgtcaagtataaacttcactttgatgctgtacttgcaaaatcacattttctttctggaaattccggcagtgtaccttgactgctagctaccctgtgccagaaaagcctcattcgttgtgcttgaacccttgaatgccaccagctgtcatcactacacagccctcctaagaggcttcctggaggtttcgagattcagatgccctgggagatcccagagtttcctttccctcttggccatattctggtgtcaatgacaaggagtaccttggctttgccacatgtcaaggctgaagaaacagtgtctccaacagagctccttgtgttatctgtttgtacatgtgcatttgtacagtaattggtgtgacagtgttctttgtgtgaattacaggcaagaattgtggctgagcaaggcacatagtctactcagtctattcctaagtcctaactcctccttgtggtgttggatttgtaaggcactttatcccttttgtctcatgtttcatcgtaaatggcataggcagagatgatacctaattctgcatttgattgtcactttttgtacctgcattaatttaataaaatattcttatttattttgttacttggtacaccagcatgtccattttcttgtttattttgtgtttaataaaatgttcagtttaacatcccagtggagaaagttaaaaaa

SEQ ID NO: 51211 - DNA, 4114 bp, Homo sapiens
  misc_feature: PD1 locus including 1kb upstream (promoter region)
gtcaggcggtttctagcctcgcttcggttattttaagctgatgagcctgacgcatctcatcactaatatcagcagtttcatttctcctgttttccattcgctgtaataaaatgctcagcacagaatacaaggagataagcaagccatttcacaaacgccgggccgccagccaggcccaggcactggaccccctgaaccaccccaccctggcacgagtgggctggagggcagggccccggggaagaaggtcaaggctggaaggggaggtcagcctcacagccagcccctgccaccgccccagcccccccgtcaggctgttgcaggcatcacacggtggaaagatctggaactgtggccatggtgtgaggccatccacaaggtggaagctttgagggggagccgattagccatggacagttgtcattcagtagggtcacctgtgccccagcgaagggggatgggccgggaaggcagaggccaggcacctgcccccagcaggggcagaggctgtgggcagccgggaggctcccagaggctccgacagaatgggagtggggttgagcccacccctcactgcagcccaggaacctgagcccagagggggccacccaccttccccaggcagggaggcccggcccccagggagatgggggggatgggggaggagaagggcctgcccccacccggcagcctcaggaggggcagctcgggcgggatatggaaagaggccacagcagtgagcagagacacagaggaggaaggggccctgagctggggagacccccacggggtagggcgtgggggccacgggcccacctcctccccatctcctctgtctccctgtctctgtctctctctccctcccccaccctctccccagtcctaccccctcctcacccctcctcccccagcactgcctctgtcactctcgcccacgtggatgtggaggaagagggggcgggagcaaggggcgggcaccctcccttcaacctgacctgggacagtttcccttccgctcacctccgcctgagcagtggagaaggcggcactctggtggggctgctccaggcatgcagatcccacaggcgccctggccagtcgtctgggcggtgctacaactgggctggcggccaggatggttcttagactccccagacaggccctggaacccccccaccttctccccagccctgctcgtggtgaccgaaggggacaacgccaccttcacctgcagcttctccaacacatcggagagcttcgtgctaaactggtaccgcatgagccccagcaaccagacggacaagctggccgccttccccgaggaccgcagccagcccggccaggactgccgcttccgtgtcacacaactgcccaacgggcgtgacttccacatgagcgtggtcagggcccggcgcaatgacagcggcacctacctctgtggggccatctccctggcccccaaggcgcagatcaaagagagcctgcgggcagagctcagggtgacagagagaagggcagaagtgcccacagcccaccccagcccctcacccaggccagccggccagttccaaaccctggtggttggtgtcgtgggcggcctgctgggcagcctggtgctgctagtctgggtcctggccgtcatctgctcccgggccgcacgagggacaataggagccaggcgcaccggccagcccctgaaggaggacccctcagccgtgcctgtgttctctgtggactatggggagctggatttccagtggcgagagaagaccccggagccccccgtgccctgtgtccctgagcagacggagtatgccaccattgtctttcctagcggaatgggcacctcatcccccgcccgcaggggctcagctgacggccctcggagtgcccagccactgaggcctgaggatggacactgctcttggcccctctgaccggcttccttggccaccagtgttctgcagaccctccaccatgagcccgggtcagcgcatttcctcaggagaagcaggcagggtgcaggccattgcaggccgtccaggggctgagctgcctgggggcgaccggggctccagcctgcacctgcaccaggcacagccccaccacaggactcatgtctcaatgcccacagtgagcccaggcagcaggtgtcaccgtcccctacagggagggccagatgcagtcactgcttcaggtcctgccagcacagagctgcctgcgtccagctccctgaatctctgctgctgctgctgctgctgctgctgctgcctgcggcccggggctgaaggcgccgtggccctgcctgacgccccggagcctcctgcctgaacttgggggctggttggagatggccttggagcagccaaggtgcccctggcagtggcatcccgaaacgccctggacgcagggcccaagactgggcacaggagtgggaggtacatggggctggggactccccaggagttatctgctccctgcaggcctagagaagtttcagggaaggtcagaagagctcctggctgtggtgggcagggcaggaaacccctccacctttacacatgcccaggcagcacctcaggccctttgtggggcagggaagctgaggcagtaagcgggcaggcagagctggaggcctttcaggcccagccagcactctggcctcctgccgccgcattccaccccagcccctcacaccactcgggagagggacatcctacggtcccaaggtcaggagggcagggctggggttgactcaggcccctcccagctgtggccacctgggtgttgggagggcagaagtgcaggcacctagggccccccatgtgcccaccctgggagctctccttggaacccattcctgaaattatttaaaggggttggccgggctcccaccagggcctgggtgggaaggtacaggcgttcccccggggcctagtacccccgccgtggcctatccactcctcacatccacacactgcacccccactcctggggcagggccaccagcatccaggcggccagcaggcacctgagtggctgggacaagggatcccccttccctgtggttctattatattataattataattaaatatgagagcatgctaaggagttctgtcctgtctggtggctgtgggggcagtgggcaggagggagggaggcctccagggagggacaaggcggcagccaggctgaggctgtgtgtggagggtgctggtggctcccctggatcctggcctgagtcaggccttcccctcgctgtcccagaaacacacaggccctcctcgccctgtttgccccactcacatgtagagccctccggtgaaaaattcctccaacatcacggggctggggacaccatcttccccaagcccaggccttttaggggggtcccacggccccctggccccaggcttcctggccaggcatgggtgtccctgagtgactgtgcctgctccatagcccccgtgtccccatgcctaccagtccctccgggcaggggtggtacctggtgccagggcgtccacagcggggtgggagggctgccctgggctatgagggacacagcatctgcgggtccctccctaagtacacagggtgggggcagcgggggaggcggggtcacgtctgctggagccctatcaccctgctgcggtccttggcagctagcagcagggacggtgcagggaaaggagccctgccaggccctcgggcaccgcagccaaacacccactgacaccccggggctcattctctgcttgccatcctggagcccagtcctggaccccatgcctgtgtcagggacaggcacagagacctcgcagctctgggaactcccggtgagatccggcagatcaggcctggcagggaacgctgcccgggggctctgcacatgatgtgggtttccatccgcaaaacccgataggtcccatggaaaatgaccacaggcaatgagaaagccatagagtgctgcctgtgagatcagcgtccagaactcacagctctcaaacacccactcacagcgcagcgcgccagcgtccagaattcacggctctcattcatccattgacagcgcagcgcgccagcatccagaactcaaggctctcaaaca

SEQ ID NO: 51212 - DNA, 36 bp, Artificial Sequence
  spacer (IgG4hinge)
gaatctaagtacggaccgccctgccccccttgccct

SEQ ID NO: 51213 - protein, 12 aa, Artificial Sequence
  spacer (IgG4hinge)
ESKYGPPCPPCP

SEQ ID NO: 51214 - protein, 119 aa, Artificial Sequence
  Hinge-CH3 spacer
ESKYGPPCPPCPGQPREPQVYTLPPSQEEMTKNQVSLTCLVKGFYPSDIAVEWESNGQPENNYKTTPPVLDSDGSFFLYSRLTVDKSRWQEGNVFSCSVMHEALHNHYTQKSLSLSLGK

SEQ ID NO: 51215 - protein, 229 aa, Artificial Sequence
  Hinge-CH2-CH3 spacer
ESKYGPPCPPCPAPEFLGGPSVFLFPPKPKDTLMISRTPEVTCVVVDVSQEDPEVQFNWYVDGVEVHNAKTKPREEQFNSTYRVVSVLTVLHQDWLNGKEYKCKVSNKGLPSSIEKTISKAKGQPREPQVYTLPPSQEEMTKNQVSLTCLVKGFYPSDIAVEWESNGQPENNYKTTPPVLDSDGSFFLYSRLTVDKSRWQEGNVFSCSVMHEALHNHYTQKSLSLSLGK

SEQ ID NO: 51216 - protein, 282 aa, Artificial Sequence
  IgD-hinge-Fc
RWPESPKAQASSVPTAQPQAEGSLAKATTAPATTRNTGRGGEEKKKEKEKEEQEERETKTPECPSHTQPLGVYLLTPAVQDLWLRDKATFTCFVVGSDLKDAHLTWEVAGKVPTGGVEEGLLERHSNGSQSQHSRLTLPRSLWNAGTSVTCTLNHPSLPPQRLMALREPAAQAPVKLSLNLLASSDPPEAASWLLCEVSGFSPPNILLMWLEDQREVNTSGFAPARPPPQPGSTTFWAWSVLRVPAPPSPQPATYTCVVSHEDSRTLLNASRSLEVSYVTDH

SEQ ID NO: 51217 - protein, 24 aa, Artificial Sequence
  T2A
LEGGGEGRGSLLTCGDVEENPGPR

SEQ ID NO: 51218 - protein, 357 aa, Artificial Sequence
  tEGFR
MLLLVTSLLLCELPHPAFLLIPRKVCNGIGIGEFKDSLSINATNIKHFKNCTSISGDLHILPVAFRGDSFTHTPPLDPQELDILKTVKEITGFLLIQAWPENRTDLHAFENLEIIRGRTKQHGQFSLAVVSLNITSLGLRSLKEISDGDVIISGNKNLCYANTINWKKLFGTSGQKTKIISNRGENSCKATGQVCHALCSPEGCWGPEPRDCVSCRNVSRGRECVDKCNLLEGEPREFVENSECIQCHPECLPQAMNITCTGRGPDNCIQCAHYIDGPHCVKTCPAGVMGENNTLVWKYADAGHVCHLCHPNCTYGCTGPGLEGCPTNGPKIPSIATGMVGALLLLLVVALGIGLFM

SEQ ID NO: 51219 - protein, 27 aa, Artificial Sequence
  CD28 (amino acids 153-179 of Accession No. P10747)
FWVLVVVGGVLACYSLLVTVAFIIFWV

SEQ ID NO: 51220 - protein, 66 aa, Artificial Sequence
  CD28 (amino acids 114-179 of Accession No. P10747)
IEVMYPPPYLDNEKSNGTIIHVKGKHLCPSPLFPGPSKPFWVLVVVGGVLACYSLLVTVAFIIFWV

SEQ ID NO: 51221 - protein, 41 aa, Artificial Sequence
  CD28 (amino acids 180-220 of P10747)
RSKRSRLLHSDYMNMTPRRPGPTRKHYQPYAPPRDFAAYRS

SEQ ID NO: 51222 - protein, 41 aa, Artificial Sequence
  CD28 (LL to GG)
RSKRSRGGHSDYMNMTPRRPGPTRKHYQPYAPPRDFAAYRS

SEQ ID NO: 51223 - protein, 42 aa, Artificial Sequence
  4-1BB (amino acids 214-255 of Q07011.1)
KRGRKKLLYIFKQPFMRPVQTTQEEDGCSCRFPEEEEGGCEL

SEQ ID NO: 51224 - protein, 112 aa, Artificial Sequence
  CD3 zeta
RVKFSRSADAPAYQQGQNQLYNELNLGRREEYDVLDKRRGRDPEMGGKPRRKNPQEGLYNELQKDKMAEAYSEIGMKGERRRGKGHDGLYQGLSTATKDTYDALHMQALPPR

SEQ ID NO: 51225 - protein, 112 aa, Artificial Sequence
  CD3 zeta
RVKFSRSAEPPAYQQGQNQLYNELNLGRREEYDVLDKRRGRDPEMGGKPRRKNPQEGLYNELQKDKMAEAYSEIGMKGERRRGKGHDGLYQGLSTATKDTYDALHMQALPPR

SEQ ID NO: 51226 - protein, 112 aa, Artificial Sequence
  CD3 zeta
RVKFSRSADAPAYKQGQNQLYNELNLGRREEYDVLDKRRGRDPEMGGKPRRKNPQEGLYNELQKDKMAEAYSEIGMKGERRRGKGHDGLYQGLSTATKDTYDALHMQALPPR

SEQ ID NO: 51227 - protein, 30 aa, Artificial Sequence
  Linker
PGGGSGGGGSGGGGSGGGGSGGGGSGGGGP

SEQ ID NO: 51228 - protein, 35 aa, Artificial Sequence
  Linker
PGGGSGGGGSGGGGSGGGGSGGGGSGGGGSGGGGP

SEQ ID NO: 51229 - protein, 17 aa, Artificial Sequence
  Linker
GSADDAKKDAAKKDGKS
